(19) United States
(12) Patent Application Publication
(10) Pub. No.: US 2004/0076956 A1
(43) Pub. Date: Apr. 22, 2004

(54) Diagnosis of diseases associated with dna repair

(76) Inventors: Alexander Olek, Berlin (DE); Christian Piepenbrock, Berlin (DE); Kurt Berlin, Stahnsdorf (DE)

Correspondence Address: Davidson Davidson & Kappel, 485 Senventh Avenue 14th Floor, New York, NY, 10018, US

(21) Appl. No.: 10/240,589

(22) PCT Filed: Apr. 6, 2001
(86) PCT No.: PCT/EP01/03972

(30) Foreign Application Priority Data
Apr. 6, 2000 (DE) 10019058.8
Apr. 7, 2000 (DE) 10019173.8
Jun. 30, 2000 (DE) 10032529.7
Sep. 1, 2000 (DE) 10043826.1

(51) Int. Cl. C12Q 1/68; C07H 21/04

(52) U.S. Cl. 435/6; 536/24.3

(57) ABSTRACT

Chemically modified genomic sequences of genes associated with DNA repair, to oligonucleotides and/or PNA-oligomers for detecting the cytosine methylation state of genes associated with DNA repair which are directed against the sequence are disclosed. In addition, a method for ascertaining genetic and/or epigenetic parameters of genes associated with DNA repair is disclosed.

[0001] The levels of observation that have been well studied by the methodological developments of recent years in molecular biology, are the genes themselves, the translation of these genes into RNA, and the resulting proteins. The question of which gene is switched on at which point in the course of the development of an individual, and how the activation and inhibition of specific genes in specific cells and tissues are controlled is correlatable to the degree and character of the methylation of the genes or of the genome. In this respect, pathogenic conditions may manifest themselves in a changed methylation pattern of individual genes or of the genome.

[0002] The present invention relates to nucleic acids, oligonucleotides, PNA-oligomers and to a method for the diagnosis and/or therapy of diseases which have a connection with the genetic and/or epigenetic parameters of genes associated with DNA repair and, in particular, with the methylation status thereof.

### PRIOR ART

[0003] The ability to repair DNA damage is an essential component of the genetic mechanisms conserving genomic fidelity. DNA damage may take several forms, including single- and double-strand breaks, inter-and intrastrand crosslinks and different kinds of base modifications. DNA damage may be the result of a variety of factors. Common exogenous sources of DNA damage include, chemical compounds and irradiation. Endogenous sources include spontaneous chemical conversion (e.g. deamination or depurination), the effect of oxygen and free radicals (causing base damage and DNA strand breaks), and malfunctions in DNA replication mechanisms (causing base mismatches and deletions). At the cellular level DNA damage may affect functions such as transcription, DNA replication, cell cycle, apoptosis and mutagenesis. At the phenotypic level this can lead to the development of diseases such as cancer and ageing. Each cell has several complex methods in place to deal with both single base, or structural mismatches. Common repair pathways for double stranded breaks are homologous recombination based mechanisms. Another common mechanism for double stranded DNA break repair is non-homologous end joining. The mechanisms of double stranded break repair, and the diseases associated with them have been reviewed by Khanna and Jackson “DNA double-strand breaks: signalling, repair and the cancer connection.” Nature Genetics March 2001 ;27(3):247-254.

[0004] Small base mismatches are generally removed by base excision repair mechanisms, these comprise specific glycosylases that remove bases, followed by polymerases and ligases that fill in the gap left by the excision. Nucleotide excision repair (NER) removes a wide diversity of lesions, which include UV-induced lesions, bulky chemical adducts, several forms of base mismatches and some forms of oxidative damage. Several variations on the pathway exist, such as global genome nucleotide excision repair and transcription-coupled nucleotide excision repair. The generalised NER process involves the action of at least 30 proteins in a mechanism involving damage identification, localised unwinding of the DNA helix, excision of the damaged portion of DNA, synthesis of a new strand and subsequent ligation. The consequences of a defect in one of the NER proteins are apparent from three rare recessive photosensitive syndromes: xeroderma pigmentosum (XP), CS and the photosensitive form of the brittle hair disorder trichothiodystrophy (TTD), see below for further references. A further overview of DNA repair mechanisms is available from standard molecular biology textbooks such as Alberts et. al. ‘Molecular biology of the cell’ Garland Publishing.

[0005] That these mechanisms are highly conserved between species highlights their importance. Malfunctions in DNA repair pathways have been implicated in a number of diseases, including cancer and ageing. Diseases associated with DNA repair mechanisms include the following:

[0006] Ataxia telangiectasia: Allen et. al. ‘Ataxia telangiectasia mutated is essential during adult neurogenesis.’ Genes and Development Mar. 1, 2001;15(5):554-566.

[0007] Ageing: Martin et. al. ‘Genetic analysis of ageing: role of oxidative damage and environmental stresses’ Nature Genetics May 1996; 13 (1): 25.

[0008] Bloom's Syndrome: Karow et. al. ‘The Bloom's syndrome gene product promotes branch migration of holliday junctions.’ Proc Natl Acad Sci U S A Jun. 6, 2000;97(12):6504-8.

[0009] Immunodeficiency: Gennery et. al. ‘Immunodeficiency associated with DNA repair defects.’ Clin Exp Immunol July 2000;121(1):1-7.

[0010] Cockayne syndrome: Hanawalt ‘DNA repair: The bases for Cockayne syndrome’ Nature 405,(2000): 415-416.

[0011] Nijmegen breakage syndrome: Digweed et. al. ‘Nijmegen breakage syndrome: consequences of defective DNA double strand break repair.’ Bioessays August 1999;21(8):649-56.

[0012] Trichothiodystrophy:Vermeulen et. al. ‘Sublimiting concentration of TFIIH transcription/DNA repair factor causes TTD-A trichothiodystrophy disorder.’ Nature Genet November 2000;26(3):307-13.

[0013] Fanconi Anaemia: Thyagarajan and Campbell ‘Elevated homologous recombination activity in fanconi anemia fibroblasts.’: J Biol Chem Sep. 12, 1997;272(37):23328-33.

[0014] Werner Syndrome: Kamath-Loeb et. al. ‘Functional interaction between the Werner Syndrome protein and DNA polymerase delta.’ Proc Natl Acad Sci U S A Apr. 25, 2000;97(9):4603-8.

[0015] Breast cancer: Bertwistle et. al. ‘The pathology of familial breast cancer How do the functions of BRCA1 and BRCA2 relate to breast tumour pathology?’ Breast Cancer Res 1999;1(1):41-47.

[0016] Lung cancer:Spitz et. al. ‘Modulation of nucleotide excision repair capacity by XPD polymorphisms in lung cancer patients.’ Cancer Res Feb. 15, 2001;61(4):1354-7.

[0017] Skin cancer: Tomescu et. al. ‘Nucleotide excision repair gene XPD polymorphisms and genetic predisposition to melanoma.’ Carcinogenesis March 2001;22(3):403-408.

[0018] Disruptions in DNA repair pathways have been found to be involved in some of the most important genes concerned with cancer such as p53, BRCA1 and BRCA2.

[0019] The complexities of the pathways leading to DNA repair allow for many mechanisms by which it can be diverted. In addition to genomic mutations, the epigenetic control of genes has been implicated in disruptions to DNA repair pathways. The epigenetic parameter that has been best characterised is DNA methylation. Methylation of DNA repair genes has been implicated as a factor in tumorigenesis ‘Promoter hypermethylation patterns of p16, O6-methylguanine-DNA-methyltransferase, and death-associated protein kinase in tumors and saliva of head and neck cancer patients.’ Cancer Res Feb. 1, 2001;61(3):939-42. The identification of methylation of DNA repair genes as a factor in tumor malignancy opens up the possibility of creating alternative methods of treatment. Methylation based therapies could have considerable advantages over current methods of treatment such as chemotherapy, surgery and radiotherapy. Furthermore, as suggested by Rosas et. al. DNA methylation analysis may provide novel means of tumor diagnosis.

[0020] 5-methylcytosine is the most frequent covalent base modification in the DNA of eukaryotic cells. It plays a role, for example, in the regulation of the transcription, in genetic imprinting, and in tumorigenesis. Therefore, the identification of 5-methylcytosine as a component of genetic information is of considerable interest. However, 5-methylcytosine positions cannot be identified by sequencing since 5-methylcytosine has the same base pairing behavior as cytosine. Moreover, the epigenetic information carried by 5-methylcytosine is completely lost during PCR amplification.

[0021] A relatively new and currently the most frequently used method for analyzing DNA for 5-methylcytosine is based upon the specific reaction of bisulfite with cytosine which, upon subsequent alkaline hydrolysis, is converted to uracil which corresponds to thymidine in its base pairing behavior. However, 5-methylcytosine remains unmodified under these conditions. Consequently, the original DNA is converted in such a manner that methylcytosine, which originally could not be distinguished from cytosine by its hybridization behavior, can now be detected as the only remaining cytosine using “normal” molecular biological techniques, for example, by amplification and hybridization or sequencing. All of these techniques are based on base pairing which can now be fully exploited. In terms of sensitivity, the prior art is defined by a method which encloses the DNA to be analyzed in an agarose matrix, thus preventing the diffusion and renaturation of the DNA (bisulfite only reacts with single-stranded DNA), and which replaces all precipitation and purification steps with fast dialysis (Olek A, Oswald J, Walter J. A modified and improved method for bisulphite based cytosine methylation analysis. Nucleic Acids Res. Dec. 15, 1996;24(24):5064-6). Using this method, it is possible to analyze individual cells, which illustrates the potential of the method. However, currently only individual regions of a length of up to approximately 3000 base pairs are analyzed, a global analysis of cells for thousands of possible methylation events is not possible. However, this method cannot reliably analyze very small fragments from small sample quantities either. These are lost through the matrix in spite of the diffusion protection.

[0022] An overview of the further known methods of detecting 5-methylcytosine may be gathered from the following review article: Rein, T., DePamphilis, M. L., Zorbas, H., Nucleic Acids Res. 1998, 26, 2255.

[0023] To date, barring few exceptions (e.g., Zeschnigk M, Lich C, Buiting K, Doerfler W, Horsthemke B. A single-tube PCR test for the diagnosis of Angelman and Prader-Willi syndrome based on allelic methylation differences at the SNRPN locus. Eur J Hum Genet. March-April 1997;5(2):94-8) the bisulfite technique is only used in research. Always, however, short, specific fragments of a known gene are amplified subsequent to a bisulfite treatment and either completely sequenced (Olek A, Walter J. The pre-implantation ontogeny of the H19 methylation imprint. Nat Genet. November 1997;17(3):275-6) or individual cytosine positions are detected by a primer extension reaction (Gonzalgo M L, Jones P A. Rapid quantitation of methylation differences at specific sites using methylation-sensitive single nucleotide primer extension (Ms-SNuPE). Nucleic Acids Res. Jun. 15, 1997;25(12):2529-31, WO 95/00669) or by enzymatic digestion (Xiong Z, Laird P W. COBRA: a sensitive and quantitative DNA methylation assay. Nucleic Acids Res. Jun. 15, 1997;25(12):2532-4). In addition, detection by hybridization has also been described (Olek et al., WO 99/28498).

[0024] Further publications dealing with the use of the bisulfite technique for methylation detection in individual genes are: Grigg G, Clark S. Sequencing 5-methylcytosine residues in genomic DNA. Bioessays. June 1994;16(6):431-6, 431; Zeschnigk M, Schmitz B, Dittrich B, Buiting K, Horsthemke B, Doerfler W. Imprinted segments in the human genome: different DNA methylation patterns in the Prader-Willi/Angelman syndrome region as determined by the genomic sequencing method. Hum Mol Genet. March 1997;6(3):387-95; Feil R, Charlton J, Bird A P, Walter J, Reik W. Methylation analysis on individual chromosomes: improved protocol for bisulphite genomic sequencing. Nucleic Acids Res. Feb. 25, 1994;22(4):695-6; Martin V, Ribieras S, Song-Wang X, Rio M C, Dante R. Genomic sequencing indicates a correlation between DNA hypomethylation in the 5′ region of the pS2 gene and its expression in human breast cancer cell lines. Gene. May 19, 1995;157(1-2):261-4; WO 97/46705, WO 95/15373 and WO 97/45560.

[0025] An overview of the Prior Art in oligomer array manufacturing can be gathered from a special edition of Nature Genetics (Nature Genetics Supplement, Volume 21, January 1999), published in January 1999, and from the literature cited therein.

[0026] Fluorescently labeled probes are often used for the scanning of immobilized DNA arrays. The simple attachment of Cy3 and Cy5 dyes to the 5′-OH of the specific probe are particularly suitable for fluorescence labels. The detection of the fluorescence of the hybridized probes may be carried out, for example via a confocal microscope. Cy3 and Cy5 dyes, besides many others, are commercially available.

[0027] Matrix Assisted Laser Desorption Ionization Mass Spectrometry (MALDI-TOF) is a very efficient development for the analysis of biomolecules (Karas M, Hillenkamp F. Laser desorption ionization of proteins with molecular masses exceeding 10,000 daltons. Anal Chem. Oct. 15, 1988;60(20):2299-301). An analyte is embedded in a light-absorbing matrix. The matrix is evaporated by a short laser pulse thus transporting the analyte molecule into the vapor phase in an unfragmented manner. The analyte is ionized by collisions with matrix molecules. An applied voltage accelerates the ions into a field-free flight tube. Due to their different masses, the ions are accelerated at different rates. Smaller ions reach the detector sooner than bigger ones.

[0028] MALDI-TOF spectrometry is excellently suited to the analysis of peptides and proteins. The analysis of nucleic acids is somewhat more difficult (Gut I G, Beck S. DNA and Matrix Assisted Laser Desorption Ionization Mass Spectrometry. Current Innovations and Future Trends. 1995, 1; 148-57). The sensitivity to nucleic acids is approximately 100 times worse than to peptides and decreases disproportionally with increasing fragment size. For nucleic acids having a multiply negatively charged backbone, the ionization process via the matrix is considerably less efficient. In MALDI-TOF spectrometry, the selection of the matrix plays an eminently important role. For the desorption of peptides, several very efficient matrixes have been found which produce a very fine crystallization. There are now several responsive matrixes for DNA, however, the difference in sensitivity has not been reduced. The difference in sensitivity can be reduced by chemically modifying the DNA in such a manner that it becomes more similar to a peptide. Phosphorothioate nucleic acids in which the usual phosphates of the backbone are substituted with thiophosphates can be converted into a chargeneutral DNA using simple alkylation chemistry (Gut IG, Beck S. A procedure for selective DNA alkylation and detection by mass spectrometry. Nucleic Acids Res. Apr. 25, 1995;23(8):1367-73). The coupling of a charge tag to this modified DNA results in an increase in sensitivity to the same level as that found for peptides. A further advantage of charge tagging is the increased stability of the analysis against impurities which make the detection of unmodified substrates considerably more difficult.

[0029] Genomic DNA is obtained from DNA of cell, tissue or other test samples using standard methods. This standard methodology is found in references such as Fritsch and Maniatis eds., Molecular Cloning: A Laboratory Manual, 1989.

### DESCRIPTION

[0030] The object of the present invention is to provide the chemically modified DNA of genes associated with DNA repair, as well as oligonucleotides and/or PNA-oligomers for detecting cytosine methylations, as well as a method which is particularly suitable for the diagnosis and/or therapy of genetic and epigenetic parameters of genes associated with DNA repair. The present invention is based on the discovery that genetic and epigenetic parameters and, in particular, the cytosine methylation pattern of genes associated with DNA repair are particularly suitable for the diagnosis and/or therapy of diseases associated with DNA repair.

[0031] This objective is achieved according to the-present invention using a nucleic acid containing a sequence of at least 18 bases in length of the chemically pretreated DNA of genes associated with DNA repair according to one of Seq. ID No.1 through Seq. ID No.144 and sequences complementary thereto and/or a sequence of a chemically pretreated DNA of genes according to table 1 and sequences complementary thereto. In the table, after the listed gene designations, the respective data bank numbers (accession numbers) are specified which define the appertaining gene sequences as unique. GenBank was used as the underlying data bank, which is located at the National Institute of Health, internet address www.ncbi.nlm.nih.gov.

[0032] The chemically modified nucleic acid could heretofore not be connected with the ascertainment of genetic and epigenetic parameters.

[0033] The object of the present invention is further achieved by an oligonucleotide or oligomer for detecting the cytosine methylation state in chemically pretreated DNA, containing at least one base sequence having a length of at least 13 nucleotides which hybridizes to a chemically pretreated DNA of genes associated with DNA repair according to Seq. ID No.1 through Seq. ID No.144 and sequences complementary thereto and/or a sequence of a chemically pretreated DNA of genes according to table 1 and sequences complementary thereto. The oligomer probes according to the present invention constitute important and effective tools which, for the first time, make it possible to ascertain the genetic and epigenetic parameters of genes associated with DNA repair. The base sequence of the oligomers preferably contain at least one CpG dinucleotide. The probes may also exist in the form of a PNA (peptide nucleic acid) which has particularly preferred pairing properties. Particularly preferred are oligonucleotides according to the present invention in which the cytosine of the CpG dinucleotide is the 5^{th}-9^{th} nucleotide from the 5′-end of the 13-mer; in the case of PNA-oligomers, it is preferred for the cytosine of the CpG dinucleotide to be the 4^{th}-6^{th} nucleotide from the 5′-end of the 9-mer.

[0034] The oligomers according to the present invention are normally used in so called “sets” which contain at least one oligomer for each of the CpG dinucleotides of the sequences of Seq. ID No.1 through Seq. ID No.144 and sequences complementary thereto and/or a sequence of a chemically pretreated DNA of genes according to table 1 and sequences complementary thereto. Preferred is a set which contains at least one oligomer for each of the CpG dinucleotides from one of Seq. ID No.1 through Seq. ID No.144 and sequences complementary thereto and/or a sequence of a chemically pretreated DNA of genes according to table 1 and sequences complementary thereto.

[0035] Moreover, the present invention makes available a set of at least two oligonucleotides which can be used as so-called “primer oligonucleotides” for amplifying DNA sequences of one of Seq. ID No.1 through Seq. ID No.144 and sequences complementary thereto and/or a sequence of a chemically pretreated DNA of genes according to table 1 and sequences complementary thereto and fragments thereof.

[0036] In the case of the sets of oligonucleotides according to the present invention, it is preferred that at least one oligonucleotide is bound to a solid phase.

[0037] The present invention moreover relates to a set of at least 10 n (oligonucleotides and/or PNA-oligomers) used for detecting the cytosine methylation state in chemically pretreated genomic DNA (Seq. ID No.1 through Seq. ID No.144 and sequences complementary thereto and/or a sequence of a chemically pretreated DNA of genes according to table 1 and sequences complementary thereto). These probes enable diagnosis and/or therapy of genetic and epigenetic parameters of genes associated with DNA repair. The set of oligomers may also be used for detecting single nucleotide polymorphisms (SNPs) in the chemically pretreated DNA of genes associated with DNA repair according to one of Seq. ID No.1 through Seq. ID No.144 and sequences complementary thereto and/or a sequence of a chemically pretreated DNA of genes according to table 1 and sequences complementary thereto.

[0038] According to the present invention, it is preferred that an arrangement of different oligonucleotides and/or PNA-oligomers (a so-called “array”) made available by the present invention is present in a manner that it is likewise bound to a solid phase. This array of different oligonucleotide- and/or PNA-oligomer sequences can be characterized in that it is arranged on the solid phase in the form of a rectangular or hexagonal lattice. The solid phase surface is preferably composed of silicon, glass, polystyrene, aluminium, steel, iron, copper, nickel, silver, or gold. However, nitrocellulose as well as plastics such as nylon which can exist in the form of pellets or also as resin matrices are possible as well.

[0039] Therefore, a further subject matter of the present invention is a method for manufacturing an array fixed to a carrier material for analysis in connection with diseases associated with DNA repair in which method at least one oligomer according to the present invention is coupled to a solid phase. Methods for manufacturing such arrays are known, for example, from U.S. Pat. No. 5,744,305 by means of solid-phase chemistry and photolabile protecting groups.

[0040] A further subject matter of the present invention relates to a DNA chip for the analysis of diseases associated with DNA repair which contains at least one nucleic acid according to the present invention. DNA chips are known, for example, for U.S. Pat. No. 5,837,832.

[0041] Moreover, a subject matter of the present invention is a kit which may be composed, for example, of a bisulfite-containing reagent, a set of primer oligonucleotides containing at least two oligonucleotides whose sequences in each case correspond or are complementary to an 18 base long segment of the base sequences specified in the appendix (Seq. ID No.1 through Seq. ID No.144 and sequences complementary thereto and/or a sequence of a chemically pretreated DNA of genes according to table 1 and sequences complementary thereto), oligonucleotides and/or PNA-oligomers as well as instructions for carrying out and evaluating the described method. However, a kit along the lines of the present invention can also contain only part of the aforementioned components.

[0042] The present invention also makes available a method for ascertaining genetic and/or epigenetic parameters of genes associated with the cycle cell by analyzing cytosine methylations and single nucleotide polymorphisms, including the following steps:

[0043] In the first step of the method, a genomic DNA sample is chemically treated in such a manner that cytosine bases which are unmethylated at the 5′-position are converted to uracil, thymine, or another base which is dissimilar to cytosine in terms of hybridization behavior. This will be understood as ‘chemical pretreatment’ hereinafter.

[0044] The genomic DNA to be analyzed is preferably obtained form usual sources of DNA such as cells or cell components, for example, cell lines, biopsies, blood, sputum, stool, urine, cerebral-spinal fluid, tissue embedded in paraffin such as tissue from eyes, intestine, kidney, brain, heart, prostate, lung, breast or liver, histologic object slides, or combinations thereof.

[0045] The above described treatment of genomic DNA is preferably carried out with bisulfite (hydrogen sulfite, disulfite) and subsequent alkaline hydrolysis which results in a conversion of non-methylated cytosine nucleobases to uracil or to another base which is dissimilar to cytosine in terms of base pairing behavior.

[0046] Fragments of the chemically pretreated DNA are amplified, using sets of primer oligonucleotides according to the present invention, and a, preferably heat-stable polymerase. Because of statistical and practical considerations, preferably more than ten different fragments having a length of 100-2000 base pairs are amplified. The amplification of several DNA segments can be carried out simultaneously in one and the same reaction vessel. Usually, the amplification is carried out by means of a polymerase chain reaction (PCR).

[0047] In a preferred embodiment of the method, the set of primer oligonucleotides includes at least two olignonucleotides whose sequences are each reverse complementary or identical to an at least 18 base-pair long segment of the base sequences specified in the appendix (Seq. ID No.1 through Seq. ID No.144 and sequences complementary thereto and/or a sequence of a chemically pretreated DNA of genes according to table 1 and sequences complementary thereto). The primer oligonucleotides are preferably characterized in that they do not contain any CpG dinucleotides.

[0048] According to the present invention, it is preferred that at least one primer oligonucleotide is bonded to a solid phase during amplification. The different oligonucleotide and/or PNA-oligomer sequences can be arranged on a plane solid phase in the form of a rectangular or hexagonal lattice, the solid phase surface preferably being composed of silicon, glass, polystyrene, aluminium, steel, iron, copper, nickel, silver, or gold, it being possible for other materials such as nitrocellulose or plastics to be used as well.

[0049] The fragments obtained by means of the amplification can carry a directly or indirectly detectable label. Preferred are labels in the form of fluorescence labels, radionuclides, or detachable molecule fragments having a typical mass which can be detected in a mass spectrometer, it being preferred that the fragments that are produced have a single positive or negative net charge for better detectability in the mass spectrometer. The detection may be carried out and visualized by means of matrix assisted laser desorption/ionization mass spectrometry (MALDI) or using electron spray mass spectrometry (ESI).

[0050] The amplificates obtained in the second step of the method are subsequently hybridized to an array or a set of oligonucleotides and/or PNA probes. In this context, the hybridization takes place in the manner described in the following. The set of probes used during the hybridization is preferably composed of at least 10 oligonucleotides or PNA-oligomers. In the process, the amplificates serve as probes which hybridize to oligonucleotides previously bonded to a solid phase. The non-hybridized fragments are subsequently removed. Said oligonucleotides contain at least one base sequence having a length of 13 nucleotides which is reverse complementary or identical to a segment of the base sequences specified in the appendix, the segment containing at least one CpG dinucleotide. The cytosine of the CpG dinucleotide is the 5^{th} to 9^{th} nucleotide from the 5′-end of the 9-mer. One oligonucleotide exists for each CpG dinucleotide. Said PNA-oligomers contain at least one base sequence having a length of 9 nucleotides which is reverse complementary or identical to a segment of the base sequences specified in the appendix, the segment containing at least one CpG dinucleotide. The cytosine of the CpG dinucleotide is the 4^{th} to 6^{th} nucleotide seen from the 5′-end of the 9-mer. One oligonucleotide exists for each CpG dinucleotide.

[0051] In the fourth step of the method, the non-hybridized amplificates are removed. In the final step of the method, the hybridized amplificates are detected. In this context, it is preferred that labels attached to the amplificates are identifiable at each position of the solid phase at which an oligonucleotide sequence is located.

[0052] According to the present invention, it is preferred that the labels of the amplificates are fluorescence labels, radionuclides, or detachable molecule fragments having a typical mass which can be detected in a mass spectrometer. The mass spectrometer is preferred for the detection of the amplificates, fragments of the amplificates or of probes which are complementary to the amplificates, it being possible for the detection to be carried out and visualized by means of matrix assisted laser desorption/ionization mass spectrometry (MALDI) or using electron spray mass spectrometry (ESI).

[0053] The produced fragments may have a single positive or negative net charge for better detectability in the mass spectrometer. The aforementioned method is preferably used for ascertaining genetic and/or epigenetic parameters of genes associated with DNA repair.

[0054] The oligomers according to the present invention or arrays thereof as well as a kit according to the present invention are intended to be used for the diagnosis and/or therapy of diseases associated with DNA repair by analyzing methylation patterns of genes associated with DNA repair. According to the present invention, the method is preferably used for the diagnosis and/or therapy of important genetic and/or epigenetic parameters within genes associated with DNA repair.

[0055] The method according to the present invention is used, for example, for the diagnosis and/or therapy of diseases.

[0056] The nucleic acids according to the present invention of Seq. ID No.1 through Seq. ID No.144 and sequences complementary thereto and/or a sequence of a chemically pretreated DNA of genes according to table 1 and sequences complementary thereto can be used for the diagnosis and/or therapy of genetic and/or epigenetic parameters of genes associated with DNA repair.

[0057] The present invention moreover relates to a method for manufacturing a diagnostic agent and/or therapeutic agent for the diagnosis and/or therapy of diseases associated with DNA repair by analyzing methylation patterns of genes associated with DNA repair, the diagnostic agent and/or therapeutic agent being characterized in that at least one nucleic acid according to the present invention is used for manufacturing it, possibly together with suitable additives and auxiliary agents.

[0058] A further subject matter of the present invention-relates to a diagnostic agent and/or therapeutic agent for diseases associated with DNA repair by analyzing methylation patterns of genes associated with DNA repair, the diagnostic agent and/or therapeutic agent containing at least one nucleic acid according to the present invention, possibly together with suitable additives and auxiliary agents.

[0059] The present invention moreover relates to the diagnosis and/or prognosis of events which are disadvantageous to patients or individuals in which important genetic and/or epigenetic parameters within genes associated with DNA repair said parameters obtained by means of the present invention may be compared to another set of genetic and/or epigenetic parameters, the differences serving as the basis for a diagnosis and/or prognosis of events which are disadvantageous to patients or individuals.

[0060] In the context of the present invention the term “hybridization” is to be understood as a bond of an oligonucleotide to a completely complementary sequence along the lines of the Watson-Crick base pairings in the sample DNA, forming a duplex structure. To be understood by “stringent hybridization conditions” are those conditions in which a hybridization is carried out at 60° C. in 2.5×SSC buffer, followed by several washing steps at 37° C. in a low buffer concentration, and remains stable.

[0061] The term “functional variants” denotes all DNA sequences which are complementary to a DNA sequence, and which hybridize to the reference sequence under stringent conditions and have an activity similar to the corresponding polypeptide according to the present invention.

[0062] In the context of the present invention, “genetic parameters” are mutations and polymorphisms of genes associated with DNA repair and sequences further required for their regulation. To be designated as mutations are, in particular, insertions, deletions, point mutations, inversions and polymorphisms and, particularly preferred, SNPs (single nucleotide polymorphisms).

[0063] In the context of the present invention, “epigenetic parameters” are, in particular, cytosine methylations and further chemical modifications of DNA bases of genes associated with DNA repair and sequences further required for their regulation. Further epigenetic parameters include, for example, the acetylation of histones which, however, cannot be directly analyzed using the described method but which, in turn, correlates with the DNA methylation.

[0064] In the following, the present invention will be explained in greater detail on the basis of the sequences and examples with reference to the accompanying figure without being limited thereto.

[0065] FIG. 1

[0066] FIG. 1 shows the hybridisation of fluorescent labelled amplificates to a surface bound oligonucleotide. Sample I being from healthy tissue and sample II being from olgodendrogliome cerebrum (tumor) tissue. Fluorescence at a spot shows hybridisation of the amplificate to the oligonucleotide. Hybridisation to a CG oligonucleotide denotes methylation at the cytosine position being analysed, hybridisation to a TG oligonucleotide denotes no methylation at the cytosine position being analysed.

### SEQ. ID NOS.1 to 144

[0067] Sequences having odd sequence numbers (e.g., Seq. ID No. 1, 3, 5, . . . ) exhibit in each case sequences of the chemically pretreated genomic DNAs of different genes associated with DNA repair.Sequences having even sequence numbers (e.g., Seq. ID No. 2, 4, 6, . . . ) exhibit in each case the sequences of the chemically pretreated genomic DNAs of genes associated with DNA repair which are complementary to the preceeding sequences (e.g., the complementary sequence to Seq. ID No.1 is Seq. ID No.2, the complementary sequence to Seq. ID No.3 is Seq. ID No.4, etc.)

### Seq. ID Nos. 145 to 148

[0068] Seq. ID Nos. 145 to 148 show the sequences of oligonucleotides used in Example 1.

[0069] The following example relates to a fragment of a gene associated with DNA repair, in this case, Uracil-DNA glycosylase (UNG) in which a specific CG-position is analyzed for its methylation status.

### EXAMPLE 1

### Methylation Analysis in the Gene Uracil-DNA Glycosylase (UNG) Associated with DNA Repair

[0070] The following example relates to a fragment of the gene UNG in which a specific CG-position is to be analyzed for methylation.

[0071] In the first step, a genomic sequence is treated using bisulfite (hydrogen sulfite, disulfite) in such a manner that all cytosines which are not methylated at the 5-position of the base are modified in such a manner that a different base is substituted with regard to the base pairing behavior while the cytosines methylated at the 5-position remain unchanged.

[0072] If bisulfite solution is used for the reaction, then an addition takes place at the non-methylated cytosine bases. Moreover, a denaturating reagent or solvent as well as a radical interceptor must be present. A subsequent alkaline hydrolysis then gives rise to the conversion of non-methylated cytosine nucleobases to uracil. The chemically converted DNA (sequence ID 73) is then used for the detection of methylated cytosines. In the second method step, the treated DNA sample is diluted with water or an aqueous solution. Preferably, the DNA is subsequently desulfonated (10-30 min, 90-100° C.) at an alkaline pH value. In the third step of the method, the DNA sample is amplified in a polymerase chain reaction, preferably using a heat-resistant DNA polymerase. In the present case, cytosines of the gene UNG are analyzed. To this end, a defined fragment having a length of 476 bp is amplified with the specific primer oligonucleotides GTTATAGTTATAGTTAGGGT (Sequence ID No. 145) and TCTCCCCTCTAATTAAACAA (Sequence ID No. 146). This amplificate serves as a sample which hybridizes to an oligonucleotide previously bonded to a solid phase, forming a duplex structure, for example AGGAAGGCGGTGGGTTT (Sequence ID No. 147), the cytosine to be detected being located at position 252 of the amplificate. The detection of the hybridization product is based on Cy3 and Cy5 fluorescently labeled primer oligonucleotides which have been used for the amplification. A hybridization reaction of the amplified DNA with the oligonucleotide takes place only if a methylated cytosine was present at this location in the bisulfite-treated DNA. Thus, the methylation status of the specific cytosine to be analyzed is inferred from the hybridization product.

[0073] In order to verify the methylation status of the position, a sample of the amplificate is further hybridized to another oligonucleotide previously bonded to a solid phase. Said olignonucleotide is identical to the oligonucleotide previously used to analyze the methylation status of the sample, with the exception of the position in question. At the position to be analysed said oligonucleotide comprises a thymine base as opposed to a cytosine base i.e AGGAAGGTGGTGGGTTT (Sequence ID No. 148). Therefore, the hybridisation reaction only takes place if an unmethylated cytosine was present at the position to be analysed. The procedure was carried out on cell samples from 2 patients, sample I being from normal healthy tissue and sample II being from a olgodendrogliome cerebrum tumor sample.

[0074] From the results (FIG. 1) it can be seen that Sample I was methylated and sample II was unmethylated.

[symbol]

### EXAMPLE 2

### Diagnosis of Diseases Associated with DNA Repair

[0075] In order to relate the methylation patterns to one of the diseases associated with DNA repair, it is initially required to analyze the DNA methylation patterns of a group of diseased and of a group of healthy patients. These analyses are carried out, for example, analogously to Example 1. The results obtained in this manner are stored in a database and the CpG dinucleotides which are methylated differently between the two groups are identified. This can be carried out by determining individual CpG methylation rates as can be done, for example, in a relatively imprecise manner, by sequencing or else, in a very precise manner, by a methylation-sensitive “primer extension reaction”. It is also possible for the entire methylation status to be analyzed simultaneously, and for the patterns to be compared, for example, by clustering analyses which can be carried out, for example, by a computer.

[0076] Subsequently, it is possible to allocate the examined patients to a specific therapy group and to treat these patients selectively with an individualized therapy.

[0077] Example 2 can be carried, out, for example, for the following diseases: Ataxia telangiectasia, Ageing, Bloom's Syndrome, Immunodeficiency, Cockayne syndrome, Nijmegen breakage syndrome, Trichothiodystrophy, Fanconi Anaemia, Werner Syndrome, solid tumors and cancer

TABLE I
Listing of particularly preferred genes of the present
invention associated with DNA repair

| | Database Entry (Genbank, internet |
|---|---|
| Gene | address www.ncbi.nlm.nih.gov) |
| PMS2L1 | D38435 |
| PMS2L12 | AF053356 |
| PMS2L2 | D38436 |
| PMS2L3 | D38437 |
| PMS2L4 | D38438 and D38500 |
| PMS2L5 | D38439 |
| PMS2L6 | D38440 |
| MGMT | NM_002412 |
| MSH2 | NM_000251 |
| NUDT1 | NM_002452 |
| TDG | NM_003211 |
| INPPL1 | NM_001567 |
| RFC4 | NM_002916 |
| DDIT1L | |
| FANCB | |
| XRCC8 | |

The application's sequence listing, which the Patent Office published only in electronic form, follows.

SEQUENCE LISTING (148 sequences)

SEQ ID NO: 1 - DNA, 10619 bp, Artificial Sequence
  chemically treated genomic DNA (Homo sapiens)
gttttatttgtttaataggaaatttttggtgtggggttttagatattttttttattttattattatatatatatatattagtagttagaattgtgtgtttttttttttttttttttttttttttgatatagagttttggtttgtcgattaggttggagtgtagtggtgtaatttcggtttattgtaatttttgttttttaagattaagggatttttttgttttagttttttgagtagtttggattataggtatgtattattatgtttagttaattgttttgtatttttagtagagatagggttttatcgtgttagttaggttggttttaaatttttgattttgtgattcgtttgttttggttttttaaagtgttgggattataggtacgagttattattttttttttttatttttgattaattttgataaaatataaaattaaattaagataaattaattttgtaaaataaagataaagttggaggttttatattttttgattttaaaatttattatgatgtggcgttggaataaagataaatatatagattaatggaatagaatagagagtttaaaaataaatttttaatatatatggttaaatgattttaataagggtgttaagattatttagtgggaaaaggatagttttttttatagatggtggatttttatatgtagaagaatgtagttggatttatattttatattaaatgtttgttgtgagtttatttatttttttgtgtgtgtggagatagggtcgtgttatgttgtttaggttgatttagaattttttatttagagatattgttaaggtaagtgagggttaagtggatattgagtgattttgtgttttattgagtaaaaataattaaatatgggcgaaggagagtttaatgattttagggataaaatgttattacgggtattttgcgtacgtttgttaggatataggagaagtaattagatattttatttatttttttagaatgtttattaatatgtttagaaaggtggaaaattttatttgttaaagagaaggaaattggaggtatggttaaaagtatttaaggttttttatgaaaaagaaatgaaaattgatattttttttaaaagagaagtaaaatagaaatttagagattttaatgtattcgaaaggttttttttgggtttttattttgtgttttgagtattgtttttaaattaaaggagatttcggtttgtttattggtagtgatgttaagaatttgggagggatatgagtgattatgttgtagatggtaagtagtttaaaaagaaggttttttaattgaaggaaaagtattaagagtagaatgttgtatatttagttaaaggaaagttgatgtggtaaaaatgatgttgttaaggtcgaaaaaggtaagaaaaaaaaataaagcggagaaagatagagaaggtaaggaaaataaaaaatgaagtcgatgataatgataaataaggtggttttatggtagtttttttttttttttttttgtttataaagtatttaatttatttggatatagtttattttttttaaagaaaaaaattgaaatgtaaagttatttaagatttatttgtaaattgtatgatggcgttttttttttgtttttgtattattaataagaattattaagtaattttttagataattttgttttggtggtattttgtatagttattaattttgtttggtatattataggggttataaattagtatgggaattttaaatttaaggtatagtataagttagttatatataaatgtgaagtaatattattaattaaattgttggtttgtgcgaagggagggttaattgtgggatttagttatttatttaataaatattggtgagtgtttgatattgttttaggtattgaggttattgtaataaaatagatataagtttttgtttttatggagtttatattttggtgagggatatagagttattaaaaaggatggtagttgggttatgagaaaggattaaagttaggaagttagaattcggggatggattgaatatgggataaaagagaagagttaagttgattataaagtatttggtttaagtaatgtaaagaatggtgggttattttttgagatgggaagtattagggtagttttggatataaatggagatgtatataagttatttaaattgaaatattgagaaggtagtaggtgatagttggttttttttaggttttagggtaggaatttttaattttttgtgtgtgtgtttaggatttttttggtggtttatgaagttttttttagaataaatattgtggaggaatttattttaatgtaatagtagtttttaggtatattattaggtaaattattttataagttataaaatagaaagttttatagattaaattatgatgtttgaattgtaggtttattgaattagtttaaaattatttatagtaagaattcgatggggtgtatgatatatataggatagggtataggcgaggtagatggattatattattagaatttagaattagggaattttttttttttttttttttttttttttttttgagattgttttattatgttgtttaggttggagtgtaatggcgtgatttcggtttattgtaatttttattttttgggtttaagcgatttttatgttttagtttttcgagtagttgggattataggtacgtattataatgtttagttaatttttgtatttttagtagagacggggttttattatgttgattaggttggttttgaatttttgattttaggtgatttattcgttttagatttttaaagcgttgggattataggtatgagttattgtatttggttaatattgatatgttttttttttttttgtcgtattagtttgttttattgatagagttgaggatgtttaaggcggtttaatagagggtatttggagtaatttatattgtattattagagagatataagtgtaagtatatttagttatagttgtagtttattaattagtttgttgaatagatttgaattttagttgtatttttggggtagagtatatgggtgttaggatgggattataattttattattaatgagtggttatttagggatgatatagttgttaatttagagatggtatgattatgttttttgatttggttattttttaagtaaaatttttatttgttttattatattttttatttattttgtttatttttaaaatattttttttttttttttgagatagggttatattgttatttaggttagagtttagtggtattattatggtttattatagttttaatttttagggtttaggtgatttttttattttagtttttcgagtagatgggattataggtatttgttattatttttagttaatttttgtagagataaggttttgttatgttgtttaggttggttttgaatttttgggtttaagggattcggttattttagttttttaaagtgttaggattataggtatgagttattgtgtttagtttatttttaacgtatttaattggttattaatttttaggattcggtttatgttttataatttttttgtttatttaatatttttgttttttaagttattagttttttttttatggttaatattttttatgagttttatttatttgtttattttttttattttttatattagaattgaatatttttaaataaagtatatttatgttataatttttgaaatgaaaaaaaaaatgtataggattagaaaagaaattaattttaataaattatattttgaagtatagttttatattaaataataagatttaggttaggtgtagtggtttatgtttgtaattttagtaatttgggaagtcgaggtgggaggattgtttgaggttaggggtttaagattagtttgggtaatatggagagattttttatttttttttttatatatatatatatatatatatatatatataaaatatttgatagtaataggtgttgttattattataatttcgagtagtgatgagtttaataatatttcgagttattattaataattgtaaagtaatatgaaaacgtttgtgatgattattgtttataaagttataggtattgttaatatttttggtatttgtagttaaatttataataaaggaaatgttaggttttagttggtattttgtttcgacggtttgtggacggtaggttagaacgttcgtttaagttaggagggtggatttagtattgtagggtttatttcgggttaattaattatattttcgaggcgggggttcggtttttcggatttagttgtttttaggggagagaggatatatttaagagtttggggtcggcgtggtagtatatgtttttgattttagtatttcgggaggttgaggcgtgaagattatttgtagtaggagtttgagattagtttagttaatttggcgagattttgtttttaaaaaaaatttttttttaattagttagttgtggtgagcgtttgtagttttagttattcgggaggttgaggtgggaggatcgttgggtttaggagttttagattgtagtgagttatgatggcggtattgtattttagcgcggtgagatttagttttaaaaataaaagggggaggggttgggggtaaaattagttgtgaaattaagtaagattttttgggatagaataattaaaggggtggcgtcgggttttttaaagagttattagtttagtttaagtttcgtttcggtttttaggtagcggtcgtagagttttattcggtaggcgttcgggaaatttcgtttttcggtcggtagggggcgcgcgtcgtcggtttcgtttcgtggacgcgggtttcgtgggcgttttcgcggttaggtattagtaatttattagggaacggcggtggtcggtgcggcgtgttcggtggcggttttggtcgtttaagagttgcggttgggtgagcgtacgcgaggcggcgaggcggtagcgtgtttttaggtcgtggcgtcgggttttcggagttttggcggtagttaggggaggatggcggagttttcggataagttttatcgagtcgagtacgttaagagcgggcgcgttttttgtaagaaatgtagcgagagtatttttaaggattcgtttcggatggttattatggtgtaggtgcgggttttgtgcgggcggcggggcggggacgcggcgtttcgggttaattgtgttcgggaaggttgggggagggcggttttagggagcgagcgggttcgggttcgggttttcggagcggtatttggggtttatgggttcgcggtcgttttttttttcgagcggttcggtcgattttttcggaaggttttgttgatgttgtaggaaaagttcgggaaataaagtttgtagttggtgttgtttttcgttttgtgaaaacgaggagttttttttttttttttttttgggtggcggtgttttattattgtcgttcgttttaggggttgggggggaattgtatatggtttttttaagttaatttgattttgatttattttgttttggagggtttttgttttatatggatggtggcgattgatatgtgggtttttttttttttttgttaaatttatttttggtagttattttaatacgttatttaaacgtttatttttattttttattttaattaggtagaattatgtagaaaggtgttatttttgtatagtatatttattttgagtttaatttgtgttttaaagtaatattttttttaaattttttagatttatagacgcgtttttttggtgtatttgtagttgtttggtttgagtaagagtggttttaggggggttttttatgtgggttttttgatagattgaatttttttttgaggttttttgagttttttgtgaggtggtgggtttgaaggtttttgttattttttaggggtttttgtttttagtttttagtttgtcgatgtttatttttgtattaataattttggtttttatttgttttgttttttttcgtttttaatatattatttaagtttagtgtttatggttaaggtagtttgattttttttttttttatgagttgtaatgtgttttaggaatgattagatattttttagtggatttttagtatttagtataagggagggcgatatttatcgagtggatatttaagtgttaggtgtattttcgttattttattttataatatgtttgttattttggtgttttcggggtatatttaagttagtacgtggtatatagtgtttatttggtaggtattttttaagttttaagtattttgttaggttttaaggatatagaatttatttttgggaatttttagtttggttaaacgggaaatgattggtaaataaatattatcgtaagagaggatggatgttatttgatggagttgtgttttaggtattgtgtgtttaggagttcgagatgatttagttaagggtggaagtttgattaggagtcgttaatttatagaagtggagtagaaagatgagaatagggaagtagatagggtttataatttgaagagttttgttgtttattaaggaatttagaatttattttgaatatataaggtagtttgttatgaagtttttatttttggtgtaggagtttttattttagggtttgtgggatggtaggtagaaggtaagaggtttatgagtttagataagaaaaaattgatatttttatttttattaatttttagataaaattattttttttaattataaatgtaagtagtaaagtaaaggtatattagtagtttttattttttttttattagtgataattatagatatttttatattattttatagttggaagttttttaaaatataatttatttttattgttataaaaattatagttattagaggttgtattagattttgttatttaatgtttaaaagtttacgggttattgtatttaaattattttttaaatgttttgataattattttagtgtttttttttcgagtttttttgtttgttttgttttttgagatggggttttattatgttgtttaggttggttttaaatttttgagtttaagcgatttatgtatttcggttttataaagtgttagggttataggtatgagttatcgtgattggttatttgcgagtttttttattacgtatttttaaatgttattttgagaaagggatatttaggcgttttaataggtgggtagagtatcgtgttttggtggaaagataaataaaatttaagtttagattgtgttgaggttagaataatatcgttgtggaggaagttagaggaggtttagttgtgggggaggtcggatggaggaaattgaatttgattaagtttagtattttggggtcgggtttggtggcgtatgtttgtaattttagtattttgggaggttggggtgggtagattatttaagtttagtagtttgagattagtttggttaatatggtgaaatttgtttttataaaaaaatgtaatgattagcgggtcgtggtggtgcgtgtttgttaaggtttagttatttcggaggttgaagttggaagattgtttgagtttgggaggtggaggttgtagtgagttgagatagtgttattgtattttagtttgggcgatagatttagatttagatttagattttgtttgaaaaaaaaaatagtaataataatattttgggtttttttttggtatatttgatagtgaaagaaattttttattattaaaagtaattgtgatttttatgtaatggtgattaagggtggatttagagttttaatttagaatttaaagttggtttggtagattgagttggtgaaggttaaaaagaaagaagtttttttatttgtttgaatttaaatatttttttttatatttatatgggagtattgttttttgagtatttgatatttgatattttagtttttatgtttggggtattttgggagggatgagttgggttttttagtattttggtgggaggaggatggcggtagatttttgagttgttttgttttgggagggtttgagtattcggaggtatgtagtgaggttagtttattttttttgtggtttaggtggataggtagtatggtttgttttgtatagaagggaatttagtttattagttgttggttgggtgaggattttggtatgttaggtgtttagtttttgtttgggtgtatagttaaagattttgtgttttgttttagttgtgtagttaataaatggagtcgatagttttgtgattttggtttggtgtttttttgttatattatttttagttttgagtttagggtaaagtattgttttggttaggggtgtttttgttgaggtttttgttttttaagtttgtgttgtgattgtattattgggtagtatttttagggtgtttagtattgtgtcggtggttgggggagatagtatttagattaaagggtagtaggtttggggtttttggtagagttaggaagaagtgttatagttattatttgtgttttttatataagggtaattggaatattgtataggaagggtagataaggggtagataagtaggtagagttaggtcgaggttattgtaaatattttatgatagttagatgtttagggatttgtattagtagtttaattgagatttggtggaacgtttgagagttggaatatgagtatgtttttagaaatgttatttgttgttttttttatagtaggaatttttttatttttttttttttgttttatttgatttggagttttaagtaaatattgcgtgttttttgtgatagatgttgttagagaatagtaagataggtttttatgaaataattattaaatgtatagtttttagtgaggggagttgtggaaggagtattgggagatttgagggagtgttttgaatagggttggagagtattttagatttaggggaaagttgatgttgaggagtttttgtgttgttatagttttagttgtgtattttaatatattatatttagaaagaggttatttatagtggagagagatagtggggtattttattattgtttttttagagtattttttttgttttcgtaattttattttaaaaatttagtatatttatttttaatgttgttttaatagttttattgtatttgtgtgatatttagttttatgttttataaaagtagatgtttgggattttttttattttagttagattatagttggtgtatttttaagtagttttttttgtcgggtagtggagtgtggtgggaggaattatagtgttaaattatttatttgttgtttttgtgatttttaattttttaggtaaggatttttagttttattgtttttatttgtgaatgaaagggttggtttttatttagaggtagattgtgggattatataggatggtttatgaaaggagtagggatttatattatatattgtgttttttttttttttttaatcgttgttatcgtttattttgtaaagttaggattgggtgtagtggtttatgtttgtaattttagtatttcgggaagtcgaggcgggcgggttacgaggttagaagttcgagattagtttggttaatatggtgaagttttattgttattaataatataaaaattagttaggtatgggtggtacgtgtttgtagttttagttatttaggaggtcgaggtaggagaatcgtttgaattcgggagatagaggttgtagtgagttgagatcgtattattgtatttagtgtaagattcggttttaaaaataaagttagatagtgttcgaggtttgggagtagaatttgattttgttataatgaaaggtttagtgggaagtaaattatttggagaggggaattgtgttttttgtggttagattttttaggttttacgtttgggaaattgcgttttagaaggttagtgagtagttgattttagttttaggtatgttgtttcgaattattcgttgttatagttgttttaaagatttttatttattttatttttatttgtgtggttgttgtaagtttgatatttttttttgatatattttttttgttttgtttattatttgggatttgttttttgttatttttaattgtagaggtatttaaagagtttttttttggggtatataggttttttgagtttaggtaagtttggagtagttgtttggttatttttagtagatgttgtaggattgtgattttgtataagtgttttttgtgtattttattaggttatgaggtagtttattattaaatgtagtagtgtgtggttaaaagggacgtggggtagagtttagtggtaaaaggttatttttttcgtggttgtgtttggtgttttaagagaatgagtttaagaatagtgggttatagttttttgatttttggggaagatcgtgagaaggatgttgtagttttttatgtgagagcggaggttgttttttttttatagataggagaataaaagttttatgtgttattttattgttggggttgggattggggtcgaggttaaggttaaggtttagtgggtttaagttaaaagttaattgtttatttatttttttttgttttttttttttttagt

SEQ ID NO: 2 - DNA, 10619 bp, Artificial Sequence
  chemically treated genomic DNA (Homo sapiens)
attagaaggaagagaaatagagggaagtaagtaagtagttaatttttgatttagatttattagattttgattttgatttcgattttagttttagttttagtagtgggatagtatatgaaatttttgtttttttatttgtgaaaggaggatagttttcgtttttatatgaagagttgtagtattttttttacgattttttttaagggttagaagattgtagtttattgtttttgagtttatttttttaggatattaaatatagttacgagaaaggtggttttttattattgagttttgttttacgttttttttgattatatattgttatatttagtggtgagttgttttatggtttagtgaaatgtatagaagatatttgtgtagagttataattttgtagtatttgttgggaatggttagataattgttttaggtttgtttggatttaaagggtttgtgtgttttagaaaagggttttttaagtgtttttgtagttaagaataataaggaataagttttagataatgagtaaagtagagaaagtgtgttagaaaaaagtgttaagtttgtagtagttatatagatgggagtggaatgaatggaggtttttgaggtaattgtgatagcggatggttcggggtagtatgtttagagttggagttagttgtttattggttttttggggcgtagttttttaggcgtaggatttgagaagtttggttatagggaatatagtttttttttttaggtggtttgttttttattaggttttttattgtgatagggttaggttttgtttttaggtttcgagtattgtttggttttgtttttgagatcgagttttgtattgagtgtagtggtgcgattttagtttattgtaatttttgtttttcgggtttaagcgatttttttgtttcggttttttgagtagttgggattataggtacgtgttatttatgtttggttaatttttgtattgttagtagtaatggggttttattatgttggttaggttggtttcgaatttttgatttcgtgattcgttcgtttcggtttttcgaagtgttgggattataggtatgaattattgtatttagttttggttttatagagtggacggtgatagcgattgggaagaaggggaagatatagtatgtagtgtgggtttttgttttttttataagttattttgtgtaattttataatttgtttttgggtgggaattagtttttttatttatagatggagatagtggggttggaaatttttgtttggggggttgggagttatagaggtagtaaatgaatgatttgatattatgattttttttattatattttattgttcggtaggaagagttatttaaaaatatattaattgtgatttgattaaagtaagggaagttttaaatatttgtttttatagaatataaagttaaatgttatatagatgtaataagattattaaaatagtattaaaagtaaatgtgttgaatttttaggatggagttgcggggatagggaaaatattttggaaaagtaatgataaggtattttattatttttttttattgtgagtggtttttttttggatgtgatgtattaaaatgtatagttaagattatggtagtataaggattttttaatattagtttttttttgggtttggaatgttttttagttttgtttagagtatttttttagattttttaatgttttttttatagttttttttattaagaattatgtatttggtgattattttataagggtttattttgttattttttagtaatatttgttatagagggtacgtagtgtttgtttagggttttaagttagatggaataaaaaaggaaggatggggaaatttttgttgtagaagagataataaatggtatttttgagagtatatttatgttttaatttttaaacgttttattagattttaattaggttgttgatatagatttttaagtatttggttattatggaatatttgtaatggtttcgatttggttttgtttgtttgtttattttttgtttattttttttgtgtaatgttttagttatttttgtataaagagtataggtaatggttatggtatttttttttggttttgttaggggttttagatttgttgttttttggtttgggtgttgttttttttaattatcggtatagtgttggatattttggaggtgttgtttaatggtgtaattatagtataagtttagaggataagagttttagtagaagtatttttgattaaagtaatgttttgttttaaatttaggattgagaatgatgtggtagaaaggtattaaattaaggttataagattatcgattttatttgttagttgtatagttgaggtaaggtatagaatttttggttgtgtatttaagtaaaaattgagtatttaatatattagggtttttatttaattagtagttggtgaattgggtttttttttgtgtagaataggttatgttatttgtttatttaggttatagagagaatgaattgattttattgtatgttttcgggtgtttaaatttttttaggatagagtaatttaaaggtttatcgttattttttttttattaaaatgttggagggtttagtttattttttttaagatgttttaggtatgagggttaaagtgttaggtattagatatttagagaataatatttttatgtaaatgtaaaagaaggtatttaaatttaagtaagtgaaaaggtttttttttttttggtttttattagtttagtttattagattaattttaaattttgaattaaaattttgaatttatttttaattattattatataaaaattatagttatttttaataataaagagttttttttattattaagtatattaaaggaaagtttagaatgttgttattattatttttttttttagatagggtttgggtttgggtttgggtttgtcgtttaggttggagtgtagtggtattattttagtttattgtaatttttattttttaggtttaagtaattttttagttttagttttcggagtagttgggttttaataggtacgtattattacgattcgttaattattgtatttttttgtagagataggttttattatgttggttaggttggttttaaattgttgagtttaagtaatttgtttattttagttttttaaagtgttgagattataagtatgcgttattaagttcggttttagaatgttaaatttgattaggtttagttttttttattcggttttttttatagttaagttttttttaattttttttatagcggtgttgttttagttttaatatagtttggatttgggttttgtttgtttttttattagaatacggtattttgtttatttgttaaggcgtttggatgttttttttttagaataatatttaaaaatgcgtaataaaaaggttcgtaaatggttagttacggtggtttatgtttgtaattttagtattttgtggggtcgaggtgtatggatcgtttgagtttaggagtttgagattagtttgggtaatatagtgagattttattttaaaaaataaaataaataaaaaggttcgaaaaggaaatattgagataattattaaaatatttgaaaggtaatttgggtatagtaattcgtgagtttttaagtattaaataataagatttagtatagtttttaataattgtgatttttgtagtaatgagagtaaattatattttgaaaaatttttaattgtaaagtgatatgaaaatatttgtaattattattggtgaaaaaaaaatagggattgttaatatgtttttgttttgttgtttatatttatgattagaggaaataattttatttagaggttagtggagatggagatattaatttttttttatttaaatttatggattttttgttttttatttattattttatagattttggggtaagagtttttgtattaggagtgagaattttataataggttgttttgtatatttaaagtaagttttaggttttttagtgggtaataaggttttttaaattgtaggttttgtttatttttttatttttatttttttgttttatttttgtgaattaacgatttttaattaagtttttatttttagttgggttatttcggatttttaggtatataatgtttagagtatagttttattaggtggtatttatttttttttacggtaatgtttgtttattagttatttttcgtttaattaaattggaaatttttaaaggtggattttgtgtttttaaaatttaatagagtgtttagaatttaaaaaatgtttattaaataagtattgtgtgttacgtattgatttaggtatgtttcgaggatattaagatgataggtatattgtgaaataagataacggaagtatatttggtatttgggtatttattcggtaaatgtcgtttttttttgtattaagtattgaaaatttattgagggatatttggttatttttaaaatatattatagtttatggaagggaggaaaattaagttattttgattatgagtattaagtttgggtaatatgttggaagcgaggaggaatagggtagatgagaattagaattattaatataaaggtagatatcggtaaattggaagttggaggtaggagtttttgggaaatgataggggtttttaagtttattattttatagaaggtttaggaaattttagaaggggatttaatttattaaaaagtttatatgagaaatttttttggagttatttttatttaaattagatagttgtaaatgtattaagagaacgcgtttgtgaatttggaaaatttggggaaaatgttattttaaagtataaattaggtttaaagtgaatgtattgtatagaaatgatatttttttgtatagttttgtttaattaaaataaaaaatgagagtgagcgtttaaatgacgtgttgaaatgattgttaaaaataggtttaataaaaaaagaaaaaaatttatatgttagtcgttattatttatgtagaataaaaattttttagaataagataggttaaaattagattagtttaaagagattatgtataatttttttttaatttttgaggcgaacggtagtaataaaatatcgttatttagaaaggagaagagaagaggtttttcgtttttataaagcgaaaggtaatattagttgtagattttatttttcgggttttttttgtaatattagtaaaatttttcggaagggtcggtcgggtcgttcgggaggaggggcggtcgcgggtttataggttttaagtgtcgtttcgagggttcgggttcgggttcgttcgttttttggggtcgtttttttttagttttttcggatatagttaattcggggcgtcgcgttttcgtttcgtcgttcgtatagggttcgtatttgtattatgatggttattcggagcgagtttttggggatgttttcgttgtattttttgtaagaggcgcgttcgtttttggcgtattcgattcgatagagtttattcgaagatttcgttatttttttttagttgtcgttaaagtttcggaagttcgacgttacgatttagaaatacgttgtcgtttcgtcgtttcgcgtgcgtttatttagtcgtagtttttgagcggttagagtcgttatcgaatacgtcgtatcggttatcgtcgttttttgatagattgttgatgtttggtcgcgggaacgtttacggaattcgcgtttacggggcggggtcggcggcgcgcgttttttgtcggtcggggggcggagtttttcgggcgtttgtcgggtggagttttgcggtcgttgtttgggggtcgaggcggggtttgggttgagttagtagttttttggaggattcggcgttatttttttgattgttttgttttaggaagttttatttgattttataattaattttatttttaattttttttttttttatttttgagattgagttttatcgcgttggagtgtagtgtcgttattatggtttattgtagtttggaatttttgagtttagcgatttttttattttagtttttcgagtagttgggattataggcgtttattataattggttaattaaaaaaaaattttttttagggatagggtttcgttaagttggttagattggttttaaatttttgttataagtgatttttacgttttagtttttcgaagtgttgggattaggggtatgtgttattacgtcggttttaaatttttaagtgtgtttttttttttttgagggtagttgggttcgggaagtcgggttttcgtttcgggaatatagttgattggttcgaggtggattttgtagtgttaggtttatttttttggtttggacgggcgttttaatttgtcgtttatagatcgtcgggataaaatattaattgaaatttagtattttttttattatgaatttgattataaatattaggagtattagtagtatttgtgattttgtgggtaatagttattatagacgtttttatgttattttatagttgttggtgataattcgaaatattattaagtttattattattcgaaattgtggtaatgatagtatttgttgttattagatattttgtgtgtgtgtgtgtgtgtgtgtgtgtgtgtaaagaaagagatggggaatttttttatgttgtttaggttggttttgaatttttggttttaagtaatttttttatttcgattttttaaattgttgggattataggtatgagttattgtatttggtttagattttgttgtttaatatagaattatattttaaaatatagtttattaaaattggttttttttttaattttatgtatttttttttttattttaaagattgtaatatgagtgtgttttatttgaaaatatttaattttggtatagaggataagaaaaataagtagatgaataaaatttataaaaagtgttaattatagagaagaagttagtggtttaagagataaggatgttgagtaagtaagaaggttgtgagatataggtcgaattttaaaagttagtaattagttagatacgttgaaggtaggttgggtatagtggtttatgtttataattttagtattttgggaggttgaggtggtcggattttttgagtttaggagtttaagattagtttggataatatggtaaaattttgtttttataaaaattagttgggggtggtggtaggtgtttgtagttttatttattcgggaggttgaggtgggaggattatttgagttttgaaggttgaggttgtggtgagttatgatagtgttattggattttagtttgggtgatagtgtgattttgttttaaaaaaaaaaaaaagatattttgaaggtaaatagaataagtggaaaatatgatggaataaataaaagttttatttagagaatgattaagttaaaaggtatgattatgttatttttgggttgataattatattatttttaaatggttatttattggtgataagattatggttttattttggtatttatatgttttgttttaaaaatgtagttaaagtttaggtttgtttagtaggttgattggtgagttgtagttgtggttgagtgtgtttgtatttgtgtttttttgatagtgtagtgtgagttgttttaggtattttttgttgagtcgttttgagtatttttaattttgttagtgggataggttgatgcggtagagagagggaaaatatattaatattagttaggtgtagtggtttatgtttgtaattttagcgttttgggaatttgaggcgggtggattatttaaggttaggagtttaaaattagtttggttaatatggtgaaatttcgtttttattaagaatataaaaattagttgggtattgtggtgcgtgtttgtaattttagttattcgggaggttgaggtatgagaatcgtttgaatttaggaggtggaagttgtagtgagtcgagattacgttattgtattttagtttgggtaatatagtgagatagttttaaaaaaagaaaagaagagaggggaggggaggattttttaattttaggttttggtggtgtggtttatttgtttcgtttgtattttattttgtgtatgttatgtattttatcgagtttttgttgtaagtggttttaaattgatttaataaatttgtaatttaagtattataatttggtttgtgaggttttttgttttgtaatttgtgggatagtttgtttgataatgtatttagaagttattattgtattaaggtaggtttttttataatatttattttggaaagggttttatggattattaaaggggttttaggtatatatataaaaggttaagaatttttgttttagaatttaaggaaagttaattattatttattgtttttttaatattttagtttggatggtttatatgtatttttatttatgtttaaaattgttttagtgttttttattttaggaaatggtttattattttttgtattatttaggttaaatgttttgtagttaatttgattttttttttttgttttatgtttaatttattttcgaattttaattttttgattttgatttttttttatggtttagttgttattttttttggtggttttgtattttttattagaatgtaagttttatgagggtaggagtttgtgtttgttttgttgtaatagttttagtgtttggaatagtgttaggtatttattaatatttgttgaatgaatgattgaattttatagttggtttttttttcgtataggttaatagtttaattaataatgttattttatatttgtatataattaatttatattgtgttttaaatttgaaatttttatgttgatttataatttttatagtatattaggtaaagttggtggttatataaaatattattaggatagggttgtttgaagaattatttgataatttttgttaataatataaaaatagaaaaagaacgttattatgtagtttataaataaattttaggtggttttatattttaatttttttttttaaaaggaatgagttgtgtttaggtaggttaaatgttttatagataagagaaaaaaaaaaaaagttgttatagaattattttatttgttattattatcgattttattttttattttttttattttttttgttttttttcgttttgttttttttttttgtttttttcggttttgatagtattatttttgttatattagtttttttttggttggatatgtagtattttgtttttggtattttttttttagttgagaagttttttttttgggttgtttgttatttgtagtatggttatttatgttttttttaggtttttggtattattgttagtggatagatcgggattttttttgatttgagggtagtatttagaatataaagtgaaagtttaaaggaggtttttcgggtgtattagaatttttgaatttttgttttattttttttttaggagggatattagtttttattttttttttataaagggttttgaatatttttggttatgtttttaatttttttttttttagtaagtaaggttttttatttttttgaatatgttaatgaatattttgagaagatgaatgaagtgtttggttgttttttttgtattttggtaagcgtgcgtagaatgttcgtgatgatattttgtttttgggattattgggttttttttcgtttatgtttagttatttttgtttagtgaggtatagaattatttagtgtttatttggtttttatttattttggtagtgtttttaggtaaggagttttagattagtttggataatatagtacgattttgtttttatatatataaaaaagtaaataaatttataataaatatttggtgtaaggtatgggtttagttatatttttttgtatgtggagatttattatttgtggaagagattgttttttttttattgaatgattttggtatttttgttgaaattatttaattatatatgttgagggtttatttttgggttttttattttgttttattggtttatatgtttgtttttattttaacgttatattatagtaagttttgaaattagaaagtgtgagatttttaattttatttttattttataaagttgatttgttttggtttggttttatattttgttaagattgattaggagtggaaagaagagatggtggttcgtgtttgtaattttagtattttgggaggttaaggtaggcggattataaggttaggagtttgagattagtttgattaatacggtgaaattttgtttttattaaaaatataaaataattagttgggtatggtggtgtatgtttataatttaagttatttaggaggttgaggtaggagaattttttgattttgggaggtagaggttgtagtgagtcgagattgtattattgtattttagtttggtcgatagattaagattttgtattaaaaagaaaaaaaagaaagaagagagatatataattttgattgttggtgtatgtgtgtgtggtggtggggtgggggggatgtttaaagttttatattagggattttttgttaagtaggtgaggt

SEQ ID NO: 3 - DNA, 5321 bp, Artificial Sequence
  chemically treated genomic DNA (Homo sapiens)
ttttttattgatatatattttgtagatttataatatcgagggttttttacgaattttaagaagtttttttttttttttagtgttgttagggattttttttttttttgatatagattttaatttgttgttaaaaagatagtaataaaggcgaaggaaaaattttgtttttttgtttttgttatttatttttttttatttaattattttttttgttttttatatttaagtaaatattaaaagagaagaggaagataaaatcgttattgttttttttattaatttttgtagtttttattatattttttataatttaagtttttgattttgtatgttattttttaggttttaattaattatttgttttttatttgttgaagtttttgtattatttttatgggaaatatgtgttttattttttcgatataatttttttatgagttggggataatgttgaattatttttaatgataattaagtgttttgttggaaaagaatttaattttaattttaaaaaggttatataaggtaatttaaataattttagttttatttataaatttaaaatattttttggtcgggtatggtggtttacgtttgtaattttagtatttagggaggtcgaggtaggtggattatttgaggttaggagtttaagattagtttgattaatagggtgaaatttcgtttttattaaaaatataaaaaagttagttaggtatggtggcgggtgtttgtaattttagttattcgggagtagagaagaatagtttggattcgggaggtagaggttgtaatgagttaaggttgtattattgtattttaatttggataataagagcgaaattttattttaaataaataaataaataaataagataaaataaaatattttttataatttataaagtattttttaaagttatttatatttttaaatttttagaataataaagtttatataattatttttagtaatataaaaataaaatatgtatttgttttaaaataataaattaggtagtgttttttagttgtttttttttgttttttgtttgtttgtttgtttgagacggagttttgtttttgttgtttaggttggaatgtaatggtgcgatttcggtttatcgtaattttcgttttttgggtttaagtgatttttttgtttagttttcggagttgttaggattataggtatttgttattatattaaattaatttttgttatttttagtatagatggggttttgttacgttggttaggttgggtttaaatttttgattttagatgatttattcgtttcgattttttaaagtgttggaattataggtatgagttgttatatttagtaattgttagttttaattgttaagatttatagaaaaaataagttttaaaataatgtaagagtttttagatatttattattttgaagattttaattttttttaattttatttattttttttttgaagtagaaatttttaatttttataattagatataaagtttgataatgataagttatttaatgttttgattatgttgttaaaatttgtaatgttataaattttgttgggggttttttggtttatagtattttaggtttagataagtttatttttgtttttgatatttttatgatttagatagaataaagaaaatattggtttagtgttttagaaattgagatggagtgggtagagttttttaaatatttgcgtattttttttatttatatataatacggttgggttggtggttttagtgatgaggcggtttattttaatgtggtttatatagtggtttatatttattaatggtttattttatagttgggttatagtacgggttataatagttatagaaattagtggggtatttatgttagggtttagggagatagaaatggaagttataattttagagattggaaaaaaataatagtgggggatataagggatgtgaggtggggtaggggtagtgatggtggtagaggtaaggtgttggttattttgatttagttaggttgtaggtatatttttttatcgttgattatttttttagttatatttttggtgtatgtaatgtagtcgatattttgggaggttaatttagattttgttagtgttttttgtagtaggtttaggataatagttcggtgatgtttggttgtattatttggaaggaattttagaaaatgaatataggttagagattatagggattttttgtagtaaaggtaggtaggaagttaaagaaagtaataggagttttagtgatgtagtaagagtttttttattttttttaagtattttattttttatatttttatatttatttttttcggtttttatataggttatttaatttttagaaatgtttttttttttattttatttagtttttaggttttaatgtaagtagtatttattttatattttttcgtgatttttttttttttttttttttttgagatagttttagttttgttatttaggttggagtgtagtggtacgatttcggtttattgtaatttttattttttgagtttaagagatttttttgttttagttttttgagtagttgggattataggcgatattattacgtttagttaatttttgtatttttagtagagacggggttttattatattggttaggttggtttcgaatttttgatttcgtgattcgtttgtttcggttttttaaagtgttgggattataggtttgagttatcgtgtttggtttttggtgattttttttttttgtgattttatagaattttatgtatgatgatgttatttatttaatataataattatagtattataattttttgtggtttgtttagtttaattatgaatattttaaagtattgagtattttatttatttttgtatttttagtgtttaagtgtttagaggagtgaatgttaaatatatatatatatttttagtgagtatttgttataatattatttgtttagggaggttttttagatatatgtaagttagttgtttttttttatgtatgtaagtgtttgaggggagagtagtaagatataatagtttatttaaaatattaattaaaagttgtaatgtgttttgtattttttttttttttgagatagagttttatttttgatgtttaggttggagtgtaatggtattatttcggtttattgtaatttttgtttttcgggtttacgtaatttttttgttttagttttttaagtagttgggtttataggtatgcgttattacgtttagttaattttttgtattttttagtggaaatatggtttttttatgttggttaggttggtttcgaatttcgattttaggtgatttgtttgttttggttttttaaagtgttgggattataggcgtgagttattacgtttagtcgtgtttggtatttttatttaatttttaagatttaatgatataggtattatttttattttaaaaataaagattaggttcgagcggtggtttatgtttgtaatttttatattttgggaggttggggtgggcggattatttgaggttaggagttcgagattagtttggtttggtggaaatttcgattttattaaaaatataaaatttagttggatgtggtggcgtatatttatagttttagttatttgggaggttggggtagaagaatcgtttgaatttggaaggtagagattgtagtgagtcgagatcgtgttattgtattttagtttgggcgatagagtaagattttgttttaaaaaaataaaataaaataaaaaataaagattaaatgtttaaaataaaaatatttaatatgaatatagtaaagttagttagttttgtttgatatgtaagtcgggagtttttttatttttatttttttatttattttagaatattttaaaaaataatttttttttaaaaagggagtgtatatttagggtaattggaatttatatttttgttaagcgttttttaaatagaatatttcgagtttatttttattatattgtttattatgttgtagtataaatatttatttatatgtttgattttatagtagtataatatttatttttgaatatttagtatataaaatgcgtttagtaaaaggtaaatgaatttattagatttacgtttaagtgtttgtaatttttttagttattagttttgtgacgttaataatgttatataattttaatgagattcggatcgaaagttgtattttattagtatttaggaagatggaaggttgattttgtgcggggaagtgcgcggaaaatttttaagttttttatttattaatttgtgttaggaggcgtgacgtaagttcgtcgcgggttcgttagtattttgttatttcgtattacgtttacgttaattttattggcgttgtttttaaaatttagtatcgtcggtatggcggaggttgggagaaaacgtcgataggatttttggtaatgttaggagttgtggaggtttttattagttcgcgttgggtcgtagtttttcggagcgtagaggaagttggttagtttgtagatagtattgggaaagatatcgcggaattttcgcgagcggagattcgttaaggtttttttagggatttgtttttttaattgttagggacgtcgagttaattttgtgttttatattcgtattcgtttttttatttttttttcgtggtttagtttagttttttttattgttttttttttttttgtatatagttagaattttaagttagtgttatataatgtgttgtgtatttggtataacgataaatagttcgagggagggttggggatttaagtgttttagagaattagaggagggaggcgaggttaagcgttttcgttacgtggtgttagatagattaattacgcgtatttttcggttacgataagcgcgtttttgattacgtgattaggttcgttatttacgtgggggtttagcgtgtatttttttttgtgttcgggttaggaggagttaggttgttatcgggtcggtgtagatacggggttgtttttttgtttataagaggggtttcgttggtagtttgaacggtaagtttgagttaggatttttaattaagatttttaattggttggagggtagatttcgcgagtagggtataaggtattatgaaatgatttagtttcgtgggtgaggggttgaagggtttatgatgtacggaggcggggaaaggatttagagataacgtggtttgaaaggcgggatttggtgcggggacgtttttgggaggagttttttttttagttttagttggttttatgatttttttgcgtttgtagg

SEQ ID NO: 4 - DNA, 5321 bp, Artificial Sequence
  chemically treated genomic DNA (Homo sapiens)
tttatagacgtaaagaaattatgaaattagttaaggttggggagaagattttttttaagagcgttttcgtattaggtttcgttttttaaattacgttatttttaaatttttttttcgttttcgtgtattataggttttttagttttttatttacgaaattagattattttatagtgttttgtattttattcgcgagatttgttttttagttaattgaggattttaattaagggttttgatttaagtttgtcgtttagattgttagcgaagttttttttatgagtaaaagagtaatttcgtatttgtatcggttcgatggtagtttagttttttttaattcgagtataaagaagggtgtacgttgagtttttacgtgggtagcggatttggttacgtgattagaggcgcgtttgtcgtggtcgaagaatgcgcgtgattggtttgtttgatattacgtgacggagacgtttagtttcgttttttttttttaattttttaggatatttaggtttttaattttttttcgggttgtttatcgttgtgttagatgtatagtatattgtgtgatattgatttaagattttaattatgtgtaagagggaaaaaaatagtggagaaggttgggttggattacgggaaagagataggaaaacggatacgaatgtaaggtatagagttggttcggcgtttttggtagttaggaagataggtttttggaggggttttggcgggttttcgttcgcgggagtttcgcggtgttttttttagtgttatttgtaggttggttagttttttttgcgtttcggaaagttgcggtttagcgcggattagtgaggatttttatagtttttgatattgttaggagttttgtcggcgtttttttttagttttcgttatgtcggcggtgttgggttttgaaggtagcgttaataagattggcgtgggcgtggtgcgggatggtaaggtgttggcgaattcgcggcggatttacgttacgttttttggtataggttggtgagtaggggatttaagagtttttcgcgtattttttcgtatagaattagttttttatttttttaaatattagtgaggtgtagttttcgattcgagttttattgaaattatgtgatattattaacgttataaggttgatgattagaagagttataggtatttggacgtggatttgatgagtttatttattttttattgagcgtattttatgtgttaagtatttagaaatagatgttatattgttgtggagttagatatataaatagatgtttatattatagtatgataaatagtataatagagatggattcgaaatattttgtttaaaaaacgtttagtaggagtatagattttagttgttttgaatatatattttttttttaaaaaaaaattattttttgaaatattttaggatgagtagagagatgagagtggaaagattttcggtttatatgttagatagaattggttggttttgttatatttatattaaatatttttgttttggatatttggtttttattttttattttattttatttttttgagatagagttttgttttgtcgtttaggttggaatgtagtggtacgatttcggtttattgtaatttttgttttttaggtttaagcgatttttttattttagttttttaagtagttaggattataggtgtgcgttattatatttagttaaattttgtatttttagtagagtcggggtttttattaggttaagttggtttcgaatttttgattttagatgattcgtttattttagttttttaaagtgtggaaattataggtatgagttatcgttcgggtttggtttttgtttttaaaatgggaataatatttgtattattaggttttgaagattagatgaaagtattaaatacggttgggcgtggtggtttacgtttgtaattttagtattttgggaggttaaggtaggtagattatttgaggtcggggttcgagattagtttgattaatatggagaaattatgtttttattaaaaaatataaaaaattaattgggcgtggtggcgtatgtttgtaaatttagttatttgggaggttgaggtaggagaattgcgtgaattcgggagatagaggttgtagtgagtcgagatggtgttattgtattttagtttgggtattaagagtgaaattttgttttaaaaaaaaaaaaagtataaaatatattataatttttaattgatattttaaataagttattatattttgttattttttttttaaatatttgtatatataggagagggtagttgatttgtatgtatttgaaaagtttttttgaataggtgatgttgtgatagatatttattagaaatatatatgtatgtttagtatttatttttttgggtatttgggtattgggaatataaagataaataaaatatttaatgttttgagatatttatgattaagttgagtaaattatagaaaattataatgttgtaattgttatgttaaataaatgatattattatgtatagagttttgtagggttatagagaaagaagattattaaaggttaggtacggtggtttaggtttgtaattttagtattttgggaggtcgaggtagacggattacgaggttaggagttcgagattagtttggttaatatggtgaaatttcgtttttattaaaaatataaaagttagttgagcgtggtggtgtcgtttgtagttttagttatttaggaggttgaggtagaagaattttttgaatttaggaggtggaggttgtagtgagtcgagatcgtgttattgtattttagtttgggtgatagagttgagattgttttaaaagaaaaaaaaaaaaaaaagattacgaaagggtatgaggtagatattatttgtattgagatttgaaggttgagtagggtaagaagaagagtatttttgaaagttgaatagtttatatagaagtcggaaagagtagatgtgaaaatgtggaagataggatgtttggggaaagtgaaaggatttttattatattattaaaatttttgttgttttttttaattttttatttatttttgttatagaaaatttttgtgatttttgatttatgtttattttttaggattttttttaggtgatatagttaggtattatcgagttgttattttagatttgttgtaggaggtattaatagagtttggattaattttttaggatatcgattgtattgtatatattaagggtatggttgggagagtggttaacgatggaggaatatatttgtaatttggttaggttaaaatagttaatattttatttttgttattattattatttttattttattttatattttttatgttttttattattgtttttttttaatttttaggattataatttttatttttatttttttaggttttggtatgggtgttttattggtttttgtggttgttgtggttcgtattgtggtttaattgtggaataagttattggtgggtgtgaattattgtataggttatattgagatgggtcgttttattattggagttattagtttaatcgtgttgtatgtgagtggaggaaatacgtaggtatttagagggttttatttattttattttaatttttgaggtattgaattagtattttttttgttttatttgagttatgggaatgttaggaataaagatggatttatttgaatttaaaatattgtagattagaaaatttttaatagagtttgtaatattgtaaattttggtagtatgattagaatattagatggtttattattattagattttatatttgattataaagattaggaatttttattttaggaaaggaatgaatgggattgaaaaggattgaaatttttaaaataatgaatatttgaaagtttttgtattattttgaagtttattttttttataaattttagtaattgaaattaatagttgttgggtatggtaatttatgtttgtaattttagtattttgggaggtcgaggcgggtggattatttgaggttaggagtttgagtttagtttggttaacgtggtaaaattttatttgtattaaaaataataaaaattaatttgatgtggtggtaggtgtttgtaattttagtaatttcggaggttgggtaggagaattatttgaatttaggaggcggaagttgcggtgaatcgagatcgtattattgtattttagtttgggtaataagagtaaaatttcgttttaaataaataaataaataaaaaataaaaaaaaataattaaaggatattatttgatttattattttggggtaagtatatgttttgtttttatattattgggaatgattatgtagattttgttattttaagagtttagaaatataaataattttaaaaaatattttgtaaattatagaaggtattttattttattttatttatttatttatttatttgagatggagtttcgtttttattgtttaggttggagtgtaatgatgtaattttggtttattgtaatttttgtttttcgggtttaaattatttttttttattttcgagtagttgggattataggtattcgttattatatttggttaatttttttgtgtttttagtagagacgggattttattttgttggttaggttggttttgaatttttgattttaggtgatttatttgtttcggtttttttaagtgttgggattataggcgtgagttattatgttcggttagaaggtattttaaatttataggtgaagttaaagttgtttgggttattttatatgatttttttaaggttgggattggatttttttttaatagaatatttgattattattagaaatagtttagtattgtttttagtttatgaaagggttgtgtcgagaagatgaggtatatgttttttatgaaaatgatgtagaaattttagtaggtagagggtaagtagttggttgaggtttgaaggatgatatataaggttagagatttgggttgtggaaagtataatggaggttataagagttgatgaaaggagtagtgacggttttgtttttttttttttttttaatgtttgtttaggtgtaagaaatagggagggtgattaggtggagaggagtggatagtagaagtagaaaggtaggatttttttttcgtttttgttattgtttttttgatagtagattaagatttgtattagaaagggaagaaatttttaatagtattgggaagggaaagggattttttaaggttcgtaggaagttttcggtgttataagtttgtagaatatgtgttagtaaggga

SEQ ID NO: 5 - DNA, 6669 bp, Artificial Sequence
  chemically treated genomic DNA (Homo sapiens)
aaaataatttaagaataaaagaagtgtatttttttgtgtaaatttattgataaaggtttttgaataggtaagaaagtatgtttgagttttttttttaatataatattatttttagtttatttttattataagtggaggtggtaatgagtaattaaatgaattgaaggggaaataatcgaaaaagagaagaaaggataagattttaattatatgaagggtattttttttttttatttgtagagagggaaagataaaaagagaggtttaaagtaagtaagagatagtaaagtacgttatgtgaaaatattttttttatatattttattattttttagaaagattagtaatttaatgttttttaagtatgtaaataatttttaggaagtcgtattttatgttgttttatattattagatttataaataatagggataaggtttttgtttataaagttataatttatttggagatagaagatatatatataaataattgtaatgtaaagtaaaaatggtaagaaaatagagttgatttattttatgggaagggaggggttggagaaattattattaagtttggaaattatgtgatgtttgaaggtgtagatgagtattgaaggatggttgggaattttaaagaagttgatagaaagtatatatgtaattatatttggggaatatgtttagtttggatgtagtataaggtttatgaagggtaatagttggagatataatagaaaagataaaatgggtaaggattatgaaaagttttagatagtaatgagtatatatattattaaataaataaaggagtgttataattagagttatatttttgtaaatgttttattaaatatttatgttttggtgatataaaggtgaatagaattagtagtttttgatttgttaggggtgtgttagttttggttttgtttgattttaaatacgtttttgatttttttgtcgttttttattgtatgatataaagtttgattttatataggtaatgttttttaagtttttttgtcggtttgttattggttgggtttagtaaataggaagtattggtgggaggttggagggtaggaggaagtagttatattttttttttattttttttttgttttagtagagttttttttaagattattatttttttattagataagttttttacgtttcgtagttaaattagttttttgattgttttttttttttttattttttttattagtatagtggttttttattgttgttaattattgagatgttttagttgtaagttgttgggcgttttagttttttttttattagtgtaaacgaatttttttattaaatttttttatgttaaatatttagaatggtttttattttttttattgtatgttgttttatatagaaggtaataaatttatttaagaaaatttttatagatgatagttttggggatttttagaatttttgaagtttgtttatttatttatgattaagattattaataaaataaaaaattaagtaagttttaaattgggaagatgaaaaagttttagaaattgatggtagtgatggttgtagaaaaatgttaatatagttaatattattgatttgtatattaaaaataaataataataataataataataataaatttattgttttgggttttaagaattatatatttttaagtgttgaattttgttagtatattttattaaaaaaaagtaaatatatatttataatgagatatgataaggttgtaatagaagtataatgttatggtaatatttaagaagtattgattgtatttgttgaatgaagttttagagattaggtatgatttgaattttgaatagaagtgtattaggaagttaaagagaagtagaatatatataagaatttttaaagaaattttaattcgtttggtatgtttgtagtataaaatagatgttaggaagttgagattaagttggagaggtaggtaggattagttttatagagtattttgaataaatagataaaaattgaattgatggtttagaggtaataaatattttgatgtattttggtttatataatattttgtaaaattttagtaaggtaataagggttatttaagtggagtagtgagatgtaaaagttagagtgtagtattttgaaggataaaaggtaggtgaagaatagtaattaagtggaatttattgttttttgaataaatttgatttgtgaaagggtgatatagaatataagatagaatgttttgtttaatgggtgtttaatgtttagtggggtttagaaaagtgtttttttgtgtgtatgtttaagaatttaaaaaaaatttaattatttgaatattaaggggagaaaatttaatttttttatgtttagtaattggtatagtgtttggaatatattaggtatttaaagatttgttagaaaaaaaatattatgaagggattaataataagaggagttgaagatggcgagggggtattgataggaaaagaattatgagtaaataataaattttatatgagaaagatatatacgatatgtatttatttaagatgtaaaatgataaacgataaaagtaagagtattaggtatggggaggtttttttgtattgtatatttttgtttatttgaaatttttagtaagaatagaattattttaatttttagattaaaaggtatagtgtgaaagttttagggagatttgtaataatagtaaataaaatgaattgcgaggataattgtttgggaagttatgatagaagtttaaaagagaagtaatggtaggtatattgcgggattggtggtagtgaaaatggaatgtgaatgataaagatttttaagataagaaaattatggttggcgttttttgtttattaaatgaaaagtaggaagttagtagagtagttggtttgtggagaaagaatatttatatatcgatgtgaattattttaattagaaaatgatattgtttttttagggtttttttaattaggggtgattttgttttttaggggatatattagtaatatttagagatatttttattgattataattgggtaagggtagggtggggaacgggtgttttattgtaatttagtgaatagaagttaggaatgttgttaaatattttataatgtttgagtataggatagttttttataataaagaattatgaggtttaaaatgttaatagtattgaggttgagaaattatgtttaagattatagttatcgaaatttaattagattattaaattgttaaaatttagaatttttaagtaaaagattaattagatattaataaaatattaaatttgttattaagtttttttaaaaatggatggtggaattattttcgtttaacgttttttgtaaaatgtgtttattaagagttttgcgtaaataatatttttgtggatagcgttgggtatttaaaagaggtataagataaatgggtttttcgaataataaaataatagtagtaatggttgtgaatattatgggaggttttattatagatgtttgttatttatttttagggacgtcgtatacgacgttcgtaaattattggttcgggttttgagttttatttggttttcgttttttgtagtataattttttttatttttttaggggataaataataataaaattcgttttttatatagataatatattttgatagataagtgatttataaataatttttttttaaatgaaggtaaaattagggttagaaaacgtttaattaatttaaggtaattaattttttgaaatttttcgttgattaaaggaataggaattgttgttttaaaatatgtaattggtattttatatttttatattggacgacgtattgcgtggaggatggagaaggaagattatttttatttttaaattcgtagttataagggcgggttattagaagggcgttaggaaggtttttttataaagatggggggtcggggaattttttatttgttttattttggttttaatattgaattaaggaaattgcgtttaaggttgaagtatacgtaattcgttcgttatgtagataaatgtttttttaggggttttaattaagtgtggaggtttgatttttttttcgaattcgttttaggtgttttatttcgagttttttttcgggttttttttcgttacgtagtttttgaagagaggagtatttatatataaagaggtttaaattgtttagaattttcgaatgacgaagaattatcgttagttttaattcgtaagttgggaggtaaaattttaaagtttttttattaagggaaaatttttggttttaaaggtttttttgtttagtatagtcgggtttaataattttttttttcgcgttcgcgtttatttaatataagtcgggttacgttcgagggtaataatatgattaaaattatagtaggaattataataaggaataagatttaggttaaagtaaatatagcgatagtttttgcgtcgtattttttggttttagtggcggtattgaattcgcggtaatttgtttcgtttttttcgttttacggtagttaatcgttttcgttagagaaagaaaggcgtcgaaatgaaattcgttttcgttcgttttcggaattgtcgttattttcgtttttagatttggaggggcggggatgaggagggcggggaggacgacgagggcgaagagggtgggtgagagtttcggagttcgagtcgaagggcgagtcgtaaacgttaagtcgttggttattggtggatatggcgtaggcgcgtttgtttcgacgggtcgaatgttttggggtagtgttttgagcgcggagatcgcgtgatattggatgcgtatgggtatatcgtgttttgcggttgtttggcgttgtttttttttttagaagtgggcgttgggtagttacgtagggtttgaatcggaagcgggagtaggtagttgcgtggttaacggagaaaagaagtcgtggttacgggaggaggcgagaggagtcgggatttgcgttgtagttatcgtcgcggttgatattattttgatttttcgagtgtagtggtaggggcgcggaggtaacgtagcggtttttgcgttgggaaatttagtcgtgtgcgatttagtttgttttttttttagatcgttaattttatgtatttttttagagtggtttttgatttttttttttttttattttattttttttggttttttttcgggtgtttagcggatttggttaataattttttttttttaaacgttttgaattgaattttgttttttgcgtattttttttttgtgttattttagggtttagatttaattacgcgatttgattagttattttttgatttttttttcgtatttagtatttttagttagcgagtatttattgatattttaattttagtttcgcggttaagagtttgggttttggaattatacggttggaattggaattttgttagtcgtgtggtcgttttttattgttttgtgaagataagtgagataattttgatttgtggtgagtattcgtgagcgttagttgttgtatttattaggtatagataagataattatagtggatgataatgtatgtggtgataggggagtattttgatggtagaggagtgattttggttttttgtaaatttagtttgagattattaatttagtttgtggtgagatttcgtagtgttattttggtagatggtagaagttttttagatggaaggaaaaatgcgtgtaaaggtataaagtgtagaaggattttgaagttttagcgtgaggtttggtattgaatgaaatatattttgtgggtttttagttgttgaagttataggaatggatgagattaagaaaataaagttgtttttgaggtatgagcggaagaagagatattaggagattttcgaaatagttataacggaagttaatatgattattgttaatatttgttgtgttttaggtattgtaagtatgtatatgggtttttaaagggatttatagaggtaggtattagtattgtttttttttttattattgagaaattgaggtttgaagagattagtgaatttgttttagattatatagtttgtaagtggttgaattaggatttgaattaatataatttgattatagaggttatattttttagtattagaaaagaatggtatgttaagggtagagttatttttaggaagatgggatataagcgttattgttaagttgtgtaaaggggttaatttggttgagatttaaaaaggaatattgaattcgttaatttagaggttcgtaggaagtaggaaatttttattttttcgtttgaattttgagtggaatttagatattttggattaatgtataagtgaagtttatttttatatggtgatatttatattttagttgattatttaatagtttttttgtttttttttagtttcgttaatatattgtgttttttaatattgtagaattttttggttatgttagtttttttttttgaagtgttggttttttagttttttttttgattggtattagttagtttagattttggttttattataaatttttttgagatatatgttttttgatagtttatttaaaatgattttttttatagttattttttattattgtgtttttgtttttttaga

SEQ ID NO: 6 - DNA, 6669 bp, Artificial Sequence
  chemically treated genomic DNA (Homo sapiens)
tttgaggaaataaaaatatagtaatagaaaataattgtagagagaattattttagataaattgttagggaatatatattttagaggagtttataataaagttaagatttgaattaattggtgttaattaaaaaaagggttagaggattaatattttagggaaggagattagtatagttaaagggttttataatgttaaagaatatagtatgttggcggaattgaaagaaggtagaggaattattaggtagttaattagagtatgagtgttattatataaagatgaattttatttatatattaatttagaatatttaggttttatttaaggtttaaacgaaaagataaggattttttattttttacgagtttttgaattgacgaatttagtgtttttttttagattttaattaagttgatttttttgtataatttgataatgacgtttatattttatttttttagaaataattttgtttttggtatgttatttttttttagtgttaaggagtgtggtttttgtagttagattgtattagtttaaattttggtttagttatttataaattgtataatttagagtaagtttattaatttttttaaattttagttttttaatgataaaaggaaaaataatattagtatttatttttatgagtttttttaaggatttatatatatgtttatagtgtttgaaatatagtaaatgttagtaatgattatattaattttcgttatgattgtttcgaaagttttttgatattttttttttcgtttatattttaaaaatagttttgtttttttggttttatttatttttatgattttagtagttgaaaatttataaaatatattttatttaatgttaggttttacgttggagttttagggtttttttatattttgtgtttttatacgtatttttttttttatttggaaggtttttattatttgttaaggtaatattgcgaggttttattataaattgaattgatagttttaggttgagtttgtagagaattaaagttatttttttattattagagtatttttttattattatatatattattatttattgtagttgttttatttgtatttggtaaatatagtagttaacgtttacgagtgtttattataggttaagattattttatttatttttataagatagtagagagcggttatacgattgatagaattttaattttagtcgtatgattttagagtttaagtttttaatcgcgaggttgaagttgaaatattaataaatgttcgttgattaaaagtattaaatacgagagagagattaaaagatgattagttaagtcgcgtagttaaatttgaattttaaggtgatataaaaagaggatgcgtaggaggtagggtttaatttagggcgtttaaaaggaggaggttattggttaagttcgttaagtattcggagagaggttaggaaagatggagtgaggagagggaggagttaagggttattttggaggggtgtatgagattggcggtttggggagaggatagattgggtcgtatacgattgaattttttagcgtagaagtcgttgcgttgttttcgcgtttttattattgtattcggaaggttaaagtagtattaatcgcggcggtggttgtagcgtagatttcgatttttttcgttttttttcgtggttacggtttttttttttcgttagttacgtagttatttattttcgttttcggtttaaattttgcgtgattgtttagcgtttatttttggaggaagaagtaacgttaagtagtcgtagagtacggtatgtttatgcgtatttagtattacgcggttttcgcgtttaaaatattgttttaaaatattcggttcgtcggagtaaacgcgtttgcgttatgtttattaatggttagcgatttagcgtttgcggttcgtttttcggttcgggtttcggggtttttatttatttttttcgttttcgtcgtttttttcgttttttttattttcgtttttttaagtttgaggacggaagtgacgatagtttcgaaggcgaacggaggcgggttttatttcggcgtttttttttttttggcggaagcgattggttgtcgtgaagcgaaagaggcgggataaattgtcgcgagtttagtgtcgttattggaattaggagatgcggcgtaggagttgtcgttgtgtttgttttaatttgagttttgttttttattgtggtttttgttgtggttttgattatgttgttattttcggacgtagttcggtttgtattgggtaagcgcggacgcgggaaggagggttattggattcggttatgttggatagaaggatttttgaggttaaaggtttttttttggtagggaagttttggggttttgttttttagtttacgagttgagattggcggtgatttttcgttattcggaggttttgggtagtttaagtttttttgtatgtagatgtttttttttttagaggttgcgtggcgaggggaagttcgaggggaagttcggggtggaatatttggggcggattcggaaggaaagttaggtttttatatttaattaggatttttgaaagagtatttgtttgtatgacggacggattgcgtgtgttttaattttgggcgtaatttttttggtttagtgttgggattaaaatagggtaaatagggagtttttcggttttttatttttgtagagagatttttttggcgtttttttaataattcgtttttataattacgaatttgggagtaggggtgattttttttttttattttttacgtaatacgtcgtttagtgtagaggtgtgaaatgttagttgtatattttaaaatagtaatttttgtttttttgattagcgaaaaattttagagggttaattgttttaaattagttgaacgttttttagttttagttttatttttatttgaggagggattgtttgtgggttatttgtttgttagggtgtattgtttgtgtgagagacgggttttgttgttgtttgttttttgaaagaataaagaggattgtattataggggacgagagttaggtaaagtttaaaattcgagttagtaatttacggacgtcgtatgcgacgtttttaaaagtaaatggtaagtatttgtgatgaaattttttatagtatttatagttattattattattattttattgttcggaaaatttatttgttttgtgttttttttaaatgtttagcgttgtttataaaaatgttatttgcgtagggtttttgataagtatattttgtaggaaacgttaaacggaaatggttttattatttatttttgaagaaatttaatgataagtttaatgttttgttaatgtttgattaattttttgtttaagaattttgagttttggtagtttggtaatttagttgagtttcggtaattatagttttaaatatggttttttagttttagtattgttaatattttgggttttataattttttattgtggggagttattttgtgtttaaatattgtaggatgtttagtagtatttttggtttttatttattagattatagtaggatattcgttttttattttatttttatttagttgtgattagtgaaaatgtttttagatattgttagtatgttttttggagggtagaattatttttagttaagaaagttttaagaaagtagtattattttttaattgaaataatttatatcgatgtgtgagtattttttttttataaattagttattttgttgattttttgttttttatttaatggataaaaaacgttagttatggtttttttattttaaaaatttttgttatttatattttatttttattgttattaatttcgtaatgtgtttgttattattttttttttggatttttgttatggttttttagatagttgttttcgtaatttattttatttattgttgttataaatttttttgaagtttttatattatattttttagtttgaaagttgagataattttatttttattaaaaattttagatgggtaggagtatataatataaaaaagtttttttatgtttaatgtttttatttttgtcgtttattattttatattttaaatagatatatatcgtgtatattttttttatatgaggtttattatttatttatgattttttttttattagtattttttcgttatttttagttttttttgttattggtttttttataatgttttttttttagtaaatttttgggtgtttagtatgttttaaatattgtgttaattgttgaatatagagaagttaagttttttttttttagtgtttagataattaggttttttttaaatttttaaatatatatataaaaaaatatttttttggattttattagatattagatatttattaaatagaatattttgttttatgttttgtgttatttttttataagttaaatttatttaaagaataatgaattttatttagttgttgttttttatttattttttattttttaggatattgtattttgatttttgtattttattattttatttaagtagtttttattgttttgttgggattttataaaatgttgtgtgggttagaatatattaaagtgtttgttgtttttgggttattagtttagtttttatttatttatttaaggtgttttgtggaattgattttatttatttttttaatttgattttaattttttaatatttgttttatgttgtagatatgttaaacgaattgaagtttttttgaaaatttttgtatgtattttatttttttttggttttttagtatatttttatttaaggtttaggttatgtttgatttttgaaattttatttagtaagtatagttagtattttttaaatgttgttatagtattgtatttttgttataattttattatgttttattgtagatgtgtgtttatttttttttgataaaatatattaataaaatttaatatttaaaaatgtatagtttttaaagtttaaaataatgagtttgttgttgttgttgttgttgttgtttgtttttaatgtatagattagtagtgttaattatattgatatttttttgtaattattattattattagtttttggaatttttttatttttttaatttgaaatttatttggttttttgttttattagtagttttagttatggatgaatggataagttttaagagttttgggagtttttaaaattattatttgtgaaggtttttttgaatagatttgttattttttgtatgagatagtatgtagtaaaaaaagtagaaattattttgagtatttaatatggaaagatttaatgagagaattcgtttatattggtgagagaaaagttaagacgtttagtagtttataattaaggtattttagtggttagtaatagtaggaagttattatgttaatgagaaggataaggagagaggaagtaattaagaggttggtttgattgcggaacgtggaagatttgtttgatgagggagtggtagttttagaggagattttattgaggtagaaagggaatgggggaaaaatatggttgtttttttttgttttttagttttttattagtgttttttatttattgagtttagttagtagtaggtcgatagaagagtttggggaatattgtttatatagagttaagttttatgttatatagtagagagcgatagaagggttaagaacgtgtttgaggttaaataggattaaaattgatatatttttaataggttaagagttgttggttttatttatttttatattattaaaatatagatatttaataaaatatttgtaaaagtatggttttgattatgatatttttttgtttatttaataatatatgtatttattgttgtttaaaattttttatgatttttatttattttgttttttttgttgtatttttaattgttattttttataaattttgtgttgtatttaaattggatatgttttttaaatatgattgtatatatattttttgttagtttttttgggatttttaattattttttagtatttatttgtatttttaaatattatataatttttaagtttagtagtggtttttttagtttttttttttttatgaagtgagttagttttatttttttattatttttgttttgtattatagttatttgtgtatatattttttatttttaagtaaattgtaattttatagatagaaattttgtttttgttatttgtggatttagtaatataagataatataaggtacggttttttaagaattatttgtatgtttaaagaatattaaattattaatttttttaggaaataataaaatatgtgaaggagatgtttttatatagcgtgttttattattttttgtttgttttaaatttttttttttatttttttttttttataagtaggaagaaaaaatattttttatatagttaggattttatttttttttttttttttcggttgttttttttttaatttatttagttatttattattatttttatttataataaaagtaggttgaagataatattatgttaagaaggaaatttaggtatatttttttatttatttagggatttttgttagtaagtttatataaaaaaatatattttttttatttttaagttgtttt

SEQ ID NO: 7 - DNA, 6070 bp, Artificial Sequence
  chemically treated genomic DNA (Homo sapiens)
gttataggaatacgttattatgttcggttaatttttttgtatttttagtagagatagggttttattatgttggttaggttggtttggaatttttgattttaagtgatttatttattttagttttttaaattgttgggattataggtgtgggttattgtgtttagtttattagatatattatattttgtttatttatttatttgttaatgaatatgtgggtgaaatatgttaatttttatttgttgtaaaaataaaatatattttttttttttttttttttttttgagatggagtttcgttttgtgttttaggttggagtgtagtggcgcgatttcggtttattgtaagttttattttttaggtttatgttatttttttgttttagtttttcgagtagttgggattataggcgtgtgttatgatatttggttaatttttgtatttttagtagagacggcgttttattatgttagttacgatggttttaatgttttgatttcgtgatttgtttgtttcggttttttaaagtgttgggattataggtatgagttatcgcgtttggttaaaatatattattgttaaataattttttaggttatttttttttatgggaaaatgtagagtaaattaatagatttttaatagtaaaatggttaaggaaaaagtaggatagagataacgtaaagatataaataatttattaaatgaataaagttattaatgttatttaggtttaaatagtattttttaaagtgagaggttggatatttataattcgataaagggtgatatttatttgatattgttgttgttttatatggttttaattattttattgtttttgtttttattgttttttaattttgtgtttttttttagtgttagttattgtggtaggttttgaagaatatttttatggagagtatattttgtagaggaagataggtatattaatagtattaatataattaatataaatgttgattgttgttatgggaaaatttaggagggatatataggtagatttggaggattaggtaaggttttttaattttttaatttttttaataatttgtagagaagttgttttgagatttgagagatgaatgagaggtatgatttggaggtaaaggttaggaaattggaaagattataaaatattttgaggaaatgataggaaaatggggatgagggatagatgatatatgagaggaagtagggatttaatcggagtttggtatttattttgaaggtaaatgggagttgttggaaggattttgtgttttttttttttttgagatagatttttattgttgtttagggtggagtgtagtggtgtgattttagtttattgtaatttttattttttatttggaaggtagatgttagcgtagggtggtgaaaggtttgtgtatttattttaattttaaatatatattttggttaggtaaggaggtttacggttgtaattttagtatttttggaggttgaggttggtagatcgtttaaggttaggagtttgagattagtttgggtaatatggtaaaattttatttttattaaaaatataaaaattatttaggcgtggtggtatgtgtttgtggttttagttatttaggaggttgaggtgggtgaattatttgagtttgggaggtggaggttgtattgagttaagatggtattattgtattttagtttgggtaatagaggtagattttgttttaaaaaataaaaataaattttaaaaaattgaaaaaatatatattttaatgattgtatgtatataatgattttatatataaatgatttatatattattttatttatattaaatgtttatataagatagatatgtaatttttagtattttataagatttttttgggagtttttttatttatttttgtttttaggggtaatttggtatgtattatatatttttttttttttttttttttgagatggagttttgttttgtcgtttaggttggagtgtagtggcgtgatttcggtttattgtaagtttcgttttttaggtttatattatttttttgttttagttttttgagtagttgggattataggcgttcgttattatgtttgattgatttttttgtattttttagtagagatagggttttatcgtgttagttaggatggttttaaattttttgatttcgtgatttatttatttcggttttttaaagtgttgggattataggcgtgagttattgcgttcggttttatatatttttttatttatttttttttgtgtttagtatagtgtttgagttttatttatattgtatgtattagtagtttatttttttattattttgtaatatagaaaaaaattgagaaaagttttgaaatggtttaaaatagattattggggttaggtatggtggtttaagtttgtaattttagtattttgggaggttaaggtaggtagattatttgaggttagaagtttatgattagtttggattatatggtgaaattttatttttattaaaaatataataaattagttaggcgtggtggtacgtatttgtagttttagttgttcgggaagttggggtaggaaaatcgtttgaatttgggaagtggaggttgtagtgagttgagattatattattgtattttagtttgggtgatagagtaagattttatttaagataaataataaaaaaatgattattgggtgttattgaaaaataaggtgtttagttgtttagtttatttttttaggatgtttgattttatgaagattttaaattttttattgtttttgagttatagaataattatataaattatagatattttttgtttatagaaatgtaaattgtggtcgggtacggtggtttatgtttgtaattttaatattttgggaggttaagataggcggattatttgaggttaggagttcgagattagtttggttaatacggtgaaattttgtttttattaaaatataaaaagttagttgggtatgatggcgggtgtttgtaattttagttattcgggaggttgagacgggagattttattgaatttgggagatggtggttgcggtgagtcgagtttgcgttattgtattttagtttgggcggttgagtgagatttcgttttaaaaaaaaaaaaaaaaaaagaaatgtaaattgtttttagtagaatgtaattgattattaagttgtggattttattagttttgttagtttttgtatatatttgtagttattttattattttttatttgattatgtgtgtggtattttgaattttttattgaagtagttgtaatttttttggatattttatttattaatgagttaaataaaatttttaatatttattttatatttgtattatatttgatattaaaattattttttaatagtagtatatagttatatgaataagttgtaatttatttatttatttattggtggatatttgggttttttttttttggttattatgaataaagttgttatgagttttttggtgaataaaggtatttattttttggggtaaatatttagaaatgggatttttggggtatagggtaggggtaaatttgattttagtagagattgatgtttttaaagtggttgtattattttatatttttattaatattgtatgagagttttatttttgtatttttgtaattaagggaattgttagtttttttattttagttattttatggagtgtttaatagtattatattttggttttaatttattatagaagatttttaggagggaggtaatttgaatagatttttatattttagaaaattttttttgcgtattatgtggagaatgattatttgtatattaaagtttatagtagtattatttataatagttaaaaggtgggaataattaagtatttatttatatggatgaatggataaataaaatgtagtatatatgtataatggaatattatttagttttaagaaggaagaaattttgatatatgttataatatagatgttttttgaagatattatgttaagtgaaataagttaattagaaaagagtaattattgtatgatttaatttatatgcggtatttcgtatttatagatagaaagtgtaatatcggttataaggggttgtgagaaacgggtaacggggagttattgtgtaataggtagattttttatttgggataatgaaaaagttttggagatggatagtggtgatggttttataataatgtgaatgtatttaatgttagtgaattgtatatttaaaaatggtgaattttatgttagatagattttattatatatataaagaggagggagggcgggagggaaggagagagggaaggaagtagagaggggagaagagaggaagaaaggaaagaaagtaagatttggtattatagggtttatattttcgcgtgttagtaataggttgaaatagaagtatggttttttacgtgtttatggaggtatttgagtgtgtgtttattttttcggtttaatgataatttgtatttgttcgtgtagaggggtacgggtgaaatagagattagtattattaaggggatggagaggagagatcgttaaaatatcgtagagatatatcgtcggagttaagagaatggggtgtagacgtttggtttggtttgtgggaattggtaagttttagtttttaaacgttcgggttttttaattcgttatagtcgggttttagttgtttattttttttaaagtttttatcgattttaaaatattaaaaataaagatttaattagtttcggaagttcgagatgtaatcgtagttatttgattttttcgttcggattttgattgggttttggagatacgcgtttttttcggcgttgtacggcgatttcgttttagtagtttgagggggcgggaatagatgttcgagtgcgatagtattggtcggtttttttaggaagtagttaatcggaataggtaagttttcggcgggaagtgagttagggtttggcgcggcggtcgtggttgcggcgcgggaagtttggattttggtttcgttcgttaggagtttgcgtgcgaggtgagtatcgcgcgcgtaattacgggtcggttcgtattgatttagttttgttttggcggttcggttcggagttggaggtcgttcgggttttttcgttttttgtattggttcgtttcggttcgttgagttttttagtttggttaatattttgggaggatagtagatatataaatacgtttttaaatggggaaatagaggttcggggcgggggcgaattttgttaaggtttttcggggcgtcggaggtcgagtatgggttaggatttggtatgttgttgtttatatattttagtgcgtaatatgatgttttgtatagagtaattttagtttagatttttggtattattattttcgtgttttttttgaggaataacgaaaatattttgtattttttttgtggttttttataattacgagttgggttatttttgtttttgagtgtttattgtgtgttatgtttttggtatttttgattttataattgtagttttacgatattttagtaaagcgaagtgtttaagaatattgtattagattgtttgggttcgaattttggtttttttatatttagttttgtgtttattgtacgttattgaaatattaagtgttttggttttcgtttgttatatgggggaaatggttttttttattttttggcgtttttgttaggattaaacgatttaatatatgtaataataaatgtttcgaaggttatttgttatatagtatatagtaagggttttgttattattatttagagaagcggatgaaattgtttttattttagatatggagaatttgaagtataaagaggttgttttcgtatagaaagagtatttggtgattaagtgttagagatataggatttgaattaagcgtttgattttaaagtatgttttataatattaggtttttttttatagtttttatttgtttttaggttatatagaattttaggtattttatggcgtgagatggagtaggtgattgatagttttttg

SEQ ID NO: 8 - DNA, 6070 bp, Artificial Sequence
  chemically treated genomic DNA (Homo sapiens)
taaggagttgttagttatttgttttattttacgttatgaggtatttaaagttttgtgtgatttaaggataggtgagggttataggagaaagtttaatgttgtgggatatattttaaaattaggcgtttagtttaaattttgtatttttagtatttaattattaaatgttttttttgtacggagataatttttttgtattttagattttttatgtttaaaatggggataattttattcgtttttttgggtaatgataatagaatttttattgtgtattatgtaataggtagttttcgaagtatttattattgtatatattaagtcgtttaattttaataaaaacgttaggaagtagaagagattattttttttatatgatagacgaaaattaagatatttagtgttttagtaacgtgtagtagatatagagttaaatgtgaaggagttagaattcgaatttaagtaatttgatgtagtatttttaagtatttcgttttgttgggatatcgtaaagttatagttgtaagattaagggtgttaggaatatggtatatagtagatatttaaaaataagagtagtttagttcgtgattatggaaggttatagaaaaagtataaagtgttttcgttgttttttaggagggatacggaggtagtagtgttagaggtttgggttgggattattttgtgtagggtattatgttacgtattggagtatatgggtaataatatgttaggttttagtttatgttcggttttcgacgtttcgggagattttggtagagttcgttttcgtttcgggtttttgtttttttatttgggaacgtatttatgtatttgttgtttttttaggatgttggttagattagaggatttagcgggtcgaggcgaattagtgtaggaaacggaagaattcgagcggtttttagtttcgggtcgggtcgttagagtagggttagattaatgcggatcgattcgtagttacgcgcgcggtatttatttcgtacgtagatttttagcggacggaattaggatttaaatttttcgcgtcgtaattacggtcgtcgcgttaagttttggtttatttttcgtcggaagtttgtttatttcgattggttgttttttggggaagtcgattaatattgtcgtattcggatatttgttttcgtttttttaggttgttggggcggggtcgtcgtatagcgtcgggagggacgcgtatttttaaagtttaattagagttcggacgggagggttagatgattacggttatatttcgggttttcggagttagttgggtttttgtttttggtgttttagagtcggtgaaggttttaaaggaagtaggtagttggaattcggttgtggcgggttgaaaagttcgggcgtttgagagttgagatttgttagtttttataggttaagttaggcgtttgtattttatttttttggtttcgacggtgtgtttttgcgatgttttggcggttttttttttttatttttttaataatattggtttttgttttattcgtatttttttatacgagtaggtgtaaattgttattgaatcgggaaagtgggtatatatttagatgtttttatggatacgtgagaaattatgtttttgttttagtttattgttgatacgcgggaatgtgggttttgtgatgttagattttatttttttttttttttttttttttttttttttttttatttttttttttttttttttttttttcgtttttttttttttttgtgtgtgtgataaaatttatttaatataaaatttattatttttaagtgtatagtttattggtattaagtatatttatattgttgtgaaattattattattatttatttttagaatttttttattattttaaatagaaaatttgtttgttatatagtaatttttcgttattcgttttttataattttttatagtcgatattgtattttttgtttgtaagtgcgaggtatcgtatataaattgaattatataataattgtttttttttgattggtttattttatttagtataatgtttttaaggagtatttatgttgtagtatgtattagaatttttttttttttgaggttaaataatattttattatatatgtatattatattttgtttatttatttatttatataaatggatgtttggttatttttattttttggttattgtgaataatgttgttatgaattttggtatataaataattattttttatataatacgtagaaagagttttttaaaatgtaaaaatttgtttaagttattttttttttgaaaattttttatggtaaattgaaattaaaatatgatattattaaatattttatagaatagttgaaatgaaaagattgataatttttttagttgtaaagatgtagaaatgggatttttatatagtgttgatgggagtgtaaaatggtataattattttggaaatattagtttttattgaaattaaatttatttttattttatattttagaaattttatttttagatatttattttaaaaaatgaatgtttttatttattaaaagatttatagtagttttatttataatagttaaagggaaaaaatttagatgtttattaatagatgaatagataaattgtagtttatttatataattgtatattattgttgaagaataattttaatattaaatataatatagatataaaataaatgttagagattttatttaatttattaatgaatgagatatttagaaagattataattgttttaatggaaaatttaaagtattatatatatagttaaatgaggaataatgaaataattataaatatatataaaaattggtagaattgatgaaatttatagtttagtaattaattgtattttattgaaaataatttgtatttttttttttttttttttttttgagacggagttttatttagtcgtttaggttggagtgtagtggcgtaagttcggtttatcgtaattattattttttaggtttaatagagtttttcgttttagtttttcgagtagttgggattataggtattcgttattatgtttagttagttttttgtattttagtagagatagggttttatcgtgttggttaggttggtttcgaatttttgattttaggtgattcgtttgttttggttttttaaagtgttaggattataggtatgagttatcgtgttcggttataatttgtatttttatagataagaagtgtttatagtttgtatagttgttttgtagtttaaagatagtgaaaggtttagagtttttatagaattagatattttagaaaagtaagttggatagttgggtattttgttttttaatgatatttagtaattatttttttgttgtttgttttagatggagttttgttttgttatttagattggagtatagtggtgtgattttagtttattgtaatttttattttttaggtttaagcgatttttttgttttagtttttcgagtagttgggattataggtacgtgttattacgtttggttaatttattgtatttttagtagagatggggttttattatgtggtttaggttggttatgaatttttgattttaggtgatttgtttgttttggttttttaaagtattgggattataggtttgagttattatgtttggttttagtaatttgttttagattattttaaagttttttttagtttttttttgtattataaagtaataggaggatgaattattggtatatataatatagatgaagtttagatattatgttgagtataaaaagaggtagataaaagagtatatagggtcgggcgtagtggtttacgtttgtaattttagtattttgggaggtcgaggtgggtggattacgaggttaggagatttgagattattttggttaatacggtgaaattttgtttttattaaaaaatataaaaaaattagttaggtatggtggcggacgtttgtagttttagttatttaggaggttgaggtaggagaatggtgtgaatttgggaggcggagtttgtagtgagtcgagattacgttattgtattttagtttgggcgatagagtaagattttattttaaaaaaaaaagagaaaaagagtatatagtgtatattaggttatttttggaggtagaggtagatgaggaagtttttaaggaaattttatggagtgttggaaattatatatttgttttatatagatatttaatatagataaagtaatatataaattatttatatataaaattattatatatatataattattgagatatgtatttttttaattttttaaaatttatttttattttttgagatagggtttgtttttgttgtttagattggaatgtagtggtgttattttggtttagtgtaatttttattttttaggtttaagtaatttatttattttagttttttgagtagttaggattataggtatatgttattacgtttgggtaatttttgtatttttagtagaaatggggttttgttatgttgtttaggttggttttaaatttttggttttaggcgatttgttagttttagtttttaaaagtgttgggattatagtcgtgagtttttttgtttggttaaggtatatatttaagattaagatgagtgtataagttttttattattttacgttaatatttattttttaggtgggaggtaaaggttgtagtgagttgagattatattattgtattttattttgggtagtagtgagaatttgttttaaaaaaaaaaaaaatatagaatttttttagtagtttttatttgtttttaaggtgaatattaaatttcgattgagtttttgtttttttttatatgttatttgttttttatttttatttttttgttatttttttaaggtgttttatagtttttttagttttttggtttttgtttttaaattatattttttatttattttttaggttttaggataatttttttgtaagttgttggagaagttgggaagttggaaagttttatttaattttttaaatttgtttgtgtattttttttaggtttttttataatagtagttagtatttgtattggttgtgttgatattattagtgtgtttgtttttttttatagaatatgttttttatgagggtgttttttagggtttattataatggttggtattagagaagggtataaaattgaagaatagtgaagataaaagtaataagatgattaaggttatgtgagatagtaataatattaggtgaatgttattttttatcgagttgtgagtatttagttttttattttgggggatattgtttgagtttaagtaatattagtggttttatttatttggtagattgtttgtatttttgcgttgtttttattttgttttttttttggttattttgttattaaaaatttgttgatttattttgtatttttttatagagaagggtagtttgaggaattatttaataatgatgtgttttggttaggcgcggtggtttatgtttgtaattttagtattttgggaggtcgaggtaggtagattacgaggttaggatattgagattatcgtggttaatatggtgaaacgtcgtttttattaaaaatataaaaattagttaggtgttatggtatacgtttgtagttttagttattcgggaggttgaggtaggagaatggtatgaatttgggaggtggagtttgtagtgagtcgagatcgcgttattgtattttagtttggggtatagagcgagattttattttaaaaaaaaaaaaaaaaaaaaaaggtgtgttttgtttttgtaataagtaaaaattgatatattttatttatatgtttattaatagatgaatgaataaataaaatgtggtatatttaataagttgggtatagtggtttatatttgtaattttagtagtttgggaggttgaggtgggtggattatttgaagttaggagttttagattagtttggttaatatagtgaaattttgtttttattaaaaatataaaaaagttagtcgggtatggtggcgtgtttttgtaat

SEQ ID NO: 9 - DNA, 6121 bp, Artificial Sequence
  chemically treated genomic DNA (Homo sapiens)
gtgcgttaagattatgttattgtattttcgtttgggtgatagagcgagattttgttttaaaaataaaataaaaaattggttcggtgtggtggtttatgtttgtaattttagtaatttgggaggttgaggtggaaggatcgtgaatttaggagttgaagattagtttgggtaataaagtcggattttgtttttttaaaaaaattaagtttaattaaatatttttaaaaataataaattagttattagaattataaatttgtattgtttttgataatgtaatgtattgttttgtaaaatattataattaagattgttattttaaggattttgaagtttgtgaagattaggtatttttttgaaattttaagataattattttttagttttttttattttttgtttttatttagaattaagtttattattaaaacgtagttttgttgacgttaagtatttatttatatgatatgtaattattggggtcgttaaaatttgggtagaatttttgttaatttattaggattttaggtaaaaaattaggaaaatgaagtgattgatttagtttgttaaaagcggatattttgaaatattattttttaattttaagaaatattttttgttaggtgcggtggtttacgtttataattttagtattttgggaggtcgaggaaggtagattacgaggttaggagatcgaggttattttggttaacgcggtgaaatttttatttttattaaaaatataaaaaattagttgggcgtgatggcgggtgtttgtagttttagttattcgggaggttgaggtaagagaatggcgtgaattcgggagatagagttcgtagtgtattagtcgcgatcgtgttattgtattttaggttgggcgatagagcgagatttagttttaaaaaaaaaagaaaaaaaagaaatatatttttttattcgttagggaaattaattttcgttttttttttttaaattatataattggaaattaatttagatattttggagtttttttagttggtgggttaattaagagaaaataggaagtgggagattttagtttagttggattatatttaggtttttataaggaattttttttggttggtatgtaaaaaaatttttttagtaagagtattaattttgaacgtgtgtaaatacgaaagttatggttaattttatttgttttttaggtttatagttagtagagttagatagttgggttttaggtttttagtttttataattgatattattgttaagtttatgtgattgatttattttgttttggtataagttagttttttttttatatcgattttttttttttttagttttaataaaatttttttaatgaaataaatttggtaattcgaattttggttattgtttttattagaggtttgtataagttaagttatttaagttgaggtcgggagtggtggtttatgtttgtaattttagtattttgggaggttaaggtaggaggatcgtttgagtttaggagtttaagattagtttgggttggtttttgagaaagcgagattttgtttcgaaaaaaaaaaaaaaaagtgtggtttgaaagttgagtgtttgataaaaaggagaaatagtgtttttttaaaattaaaggtttttaattaagatttttttaacggggtttcgaaaaaaggagaatgggatgagaaggatatatgggtagtgttattttttaatttgtagattttattttagttttttagttatcgttttttagtattttatgtttttaagatagtgttattattttaaggatttttttttattttttttgtttgggttttttttttattgaggagtcgtggttttttattagtagaagtcggatgtttttgtgttcgaaattggtgggtttttggttttattgattttaagaatgaagttgcggatttttacggtgagtggtatagtttttaaagatgatgtgtttagagtttgttttttttgatgttcggacgtgtttagagttatttttttttggtggattcgtggtttcgttggttttaggagtgaagttgtagatttttgcggtgagtgttatagtttttaaggcggtatgtttggagtttgttcgtttttttcgtttggagttgtttattttttttggtgggttcgtggtttcgttggttttaggagtgaagttgtagatttttgcggtcggtgttattagtagataaatgttatgcggatttaaagagtgagtagtagtaagatttattgtaaagagtataagaataaagtttttatagcgtggaaggagattagagcgggttgttgttgttggtttaggtagtttgtatttttttttttttttttttttttttttgagatggagtttttttttgttatttaggttggaatgtagtggtgtaatttgggtttattgtaagtttcgtttttcgggtttacgttatttttttgttttaatttttttagtagaggggattataggtatttattatcgtatttagttaatattttgtttttttagtagagtcggggttttattgtgttagttaggatggtttcgattttttgatttcgtgatttatttttttaggttttttaaattgttgggattataggtgtgagttattggtatttagcggggtagtttgtttttatttttttatttgattttatttatattttgttgattggtttattttatagagagttaattggttcgttttgatagggtgttgattggtgtatttataatttttgagttagatatatatagagtgttgattggtgtatttataattttttagttagatataaaaattttttaagtttttattatatttgttagatatagagtattgattggtgcgtttataaatttttagttagatatagagtgttgattggtgtatttgtaaattttgagttagatatagagtattgattggtgtatttataattttttagttagatatagaagttttttaagtgtttattagattagttagatatagagtgttgattggtgtatttttaaattttaagttagatatagagtgttgattggtgtatataaaatttttaggttagatataaaagttttttaagtttttatttgatttaggagtttagttggttttatttagtggattttgcgtagggttgtgtcgggcgtttgtattttttttagtttttgggtagtcgatgggatcgggcgttgaggagtagggggcggtgttcgtcggggaggtttaggttacgttggagtttataggggttgggagggggttcgggtatggcgggttgtaggttttgagttttgttttgtgtagggcggttggggttcggtgagaatttaagcggggtgtaggcgggtcggtagtgttgggggattcggcgtattttttgtagttgttggttcgggtgttaggtttttgattgttcggggtcgggggtgcggggttcgttgagttcgcgtttatttggaattcgcgttggttggcgagcgttgcgcgtagttttagtttttatattcgtttttttttttatattttttcgtaagtagagggagtcggttttggtttcggttagtttagagaggggtttttatagcgtagtggcgggttgaagggtttttttagtacggttagaatggacgttaaggtcgaggaggcgtcgagagcgagcgagggttgttagtacgttgttatttcgtattttgaattatagattttttaatttttcggcgtttttcgtttattcggttttttagaatacgaagggtttttttattttgttattaaaacgattagttgttcggagatacggaaaaagtcgttttttttttttgtaggattttttttttgaatttttttaaatttttttagtgtgacgtgattttatttttagttaatttaggttgtttttttattagtttttcgttttttggggaggcggtaatgtaaagatcgttcgttgttagttttgtcgttatttttgtggggtgaatttaatatggcggataaagatagtaattagtttcgttttttcgcgttttcgttaagaagattggtttttattatttgttttttaaaacgattattttattgattggtggcgattgcgtcgacggagacggggtaaaagtaagttgaattcgaaaaataataaatattggggttgaggggtggaattacgagtgcgtagatatgggttagagcgtattttttttgttttaggtaaattcggcgtttattgcgttttcgtaggttattgattttataagattatttgttttagatttttggggttggatgggaattgtagtttttttaaagagttgtacgtatttttttaaggtttagtttttgtttttaaaatacgaaaatataatattttagtttataattgttgataagtataagcgcgtataggtttttaatttatttattggattttcgtgagaattgtgttcgttttggtattggatgtttttttttataagattatagtttttaaggaatattgtggcgaagattttttatttcgtaacgtatgttggaaataattatttttttttatttttttaataatttttattatttatatttatcgaaattggagatttttattagggcggaaagagtgggggattgggatttttttttacgattgttttggataataggtagcgattttgattttcgtatagtaattattgtgatgtaataagtcgtaattggaagagtagaggttagagggtaggtattttatggtaaatttaggtagaattttttttttttcgtttttttttttttacgttattcgggggtagattgggtggttaatttagagtttcgagagacgtttggttttttttgttttttttattttttgattgtattttgatttcgtattttgagaggttgttgtttagcggtagttttttggttttcgtggtaacggaaaagcgcgggaattatagataaattaaaattgcgattgcgcggcgtgagttcgttgagattttttggacgggggataggttgtggggttttttagataattgggtttttgcgtttaggaggtttttattttttgttttgggtaaaggtagtagagtttcgggaaagggatagggggtttaagtgatgttttggggtattggcgtgggagagtggattttcgaagttgatagatgggtattttttgacggggggtaggggcggaatttgagaggcgtaaggcgttgtgaattttggggaggggggtagtttgtaggtcgcgagggaagcgttgaggattaggaagggggtattgagtgttcgtgggggaattttcgtgataggaattggaatatgttttgagggggatattatgtttttaaaaacgtcggttggttatgaggttaggagttttagattagtttgattaacgtggtgaaatttcgtttttattaaaaatataaaaattagtcgggcgtggtgtcgttttagttatttaggaggttgaggtaggagaatcgttagaattcgggaggcggaggttgtagtgagtcgagatcgcgttattgtattttagtttgggcgatagagcgagattgttttaaaataaaataaaataaaataaaataaaaaatatcggttggtatgtatgagaggatgggattttgtggaagaagaggtgttaggaatatgtttgggaaggggaggagataggattttgtgggagggagaatttaagaattggatttatttgcgttattgagaaagcgtaagagggaagtagaggagcgttagtagtaatagatgttgtcggtagggatgtgtttgaggaggatttagagatgagagtaggttattgggaaaggttaggggcggggaggttttgattggtgttggtttggtcgttgttgattttggttttatgtaagaaaaagaaaataattagaaatattggagaaagttaaggttattattatttattcggttagttatttttttgtagtttttttttttttggagaaaggaaaagatttaaggggttggtagtaatatgtgaaaaaatttagaatttatgttgtttaattataaaaagtaatttttagaatttt

SEQ ID NO: 10 - DNA, 6121 bp, Artificial Sequence
  chemically treated genomic DNA (Homo sapiens)
aagattttagaagttgttttttgtaattagataatataaattttgaatttttttatatattgttgttaattttttgggtttttttttttttttaagaaagagaaagttatagaggagtgattgatcgggtaggtggtggtagttttagttttttttaatgtttttggttgtttttttttttttgtataaaattaaaattaataacgattaaattaatattaattaaggttttttcgtttttaattttttttagtgatttgtttttatttttggattttttttaagtatatttttgtcggtagtatttgttattattgacgtttttttattttttttttgcgtttttttaatggcgtaaatggatttagtttttaagtttttttttttataaaattttgtttttttttttttttagatatatttttggtatttttttttttataaggttttatttttttatatatattagtcggtgttttttgttttgttttgttttgttttgttttgagatagtttcgttttgtcgtttaggttggagtgtaatggcgcgatttcggtttattgtaattttcgtttttcgggttttagcgatttttttgttttagttttttgagtagttggagcggtattacgttcggttaatttttgtatttttagtagagacggagttttattacgttggttaggttggtttggaatttttgattttatgattagtcgacgtttttaaagatatagtgttttttttaaggtatattttagtttttattacgaggatttttttacggatatttagtgttttttttttgatttttagcgtttttttcgcgatttataaattgtttttttttttagggtttataacgttttacgttttttaggtttcgtttttatttttcgttaaagaatatttatttgttagtttcggaaatttatttttttacgttagtattttagagtattatttgggttttttgtttttttttcgggattttattatttttatttagagtagagggtgaaggttttttgagcgtaggggtttagttatttgagaaattttatagtttgtttttcgtttaggaagttttagcgagtttacgtcgcgtagtcgtagttttaatttatttgtaattttcgcgttttttcgttgttacggaaattaaggggttatcgttaagtagtagttttttagaatacgaaattaaggtataattagaggatgggagggatagaaagagttaagcgtttttcggggttttggattggttatttagtttgttttcggatgacgtaaaaggaaagagacggaagaggaagaattttatttgagtttgttataaagtgtttgttttttagtttttatttttttagttgcggtttattgtattatagtaattgttgtacgaaggttagaatcgttatttattgtttaaagtagtcgtaagaagaggttttaattttttatttttttcgttttaatggaggtttttagtttcggtaaatataagtaataaggattgttgggggggtggagggaaataattatttttagtatgcgttgcggaatgaaaggttttcgttatagtgttttttagaaattgtagttttatggagaggaatatttaatattagagcgggtataatttttacggaaatttagtggatagattggagatttgtgcgcgtttgtatttgttaatagttatggattggagtgttatgttttcgtattttgaaagtagaaattaggttttaaaaagatacgtataattttttagggagattataatttttatttagttttaggagtttggggtaagtagttttgtaaggttagtggtttgcggggacgtagtgagcgtcgaatttgtttggggtaggggaaatgcgttttggtttatgtttgcgtattcgtagttttattttttagttttagtgtttgttatttttcgggtttagtttgtttttgtttcgttttcgtcgacgtaatcgttattagttaatggggtggtcgttttgagggataagtggtaagagttaatttttttggcgaaaacgcggagaaacgggattagttattgtttttgttcgttatgttagatttattttatagagatagcggtagagttggtagcggacggtttttgtattgtcgtttttttagggggcgggaagttggtaaggaagtagtttgggttagttaggggtggggttacgttatattaagagggtttggagaagtttaagggaggaattttgtaaagaagaggggcgatttttttcgtgttttcggatagttaatcgttttagtgataggatgagagagtttttcgtgttttgagggatcgagtgggcgaaaagcgtcggagagttggagagtttgtggtttagaatgcgaggtgataacgtgttagtagttttcgttcgttttcggcgttttttcggttttggcgtttattttggtcgtgttggaggagttttttagttcgttattgcgttgtgggggtttttttttgggttggtcgaagttagagtcggttttttttgtttgcggggaagtgtggagggagaggcgggtgtgggaattggggttgcgcgtagcgttcgttagttagcgcgagttttaggtgggcgcgggtttagcgggtttcgtattttcggtttcgggtagttaggggtttagtattcgggttagtagttgtagagggtgcgtcgggttttttagtattgtcggttcgtttgtatttcgtttgaatttttatcgggttttagtcgttttgtatagggtaaggtttaggatttgtagttcgttatgttcgagtttttttttaatttttgtgagttttagcgtggtttgagttttttcgacgggtatcgttttttgttttttagcgttcggttttatcgattgtttaagggttgagaggagtgtaggcgttcggtatagttttgcgtaggatttattaggtgaagttagttgggtttttgagttagatggggatttggaaaatttttatgtttagtttgaggattttatatgtattagttagtattttgtgtttagtttggggtttggggatgtattaattagtattttgtatttagttaatttggtgggtatttggagaatttttgtgtttagttaaaggattgtaaatgtattaattagtgttttgtgtttagtttaaggtttgtaaatgtattaattagtattttgtgtttagttaaaggtttgtaaacgtattaattagtgttttgtgtttagtaaatgtagtggggatttggagaatttttatgtttagttagaggattgtaaatgtattaattagtattttgtgtatatttagtttagggattgtaaatgtattaattagtattttgttaaaacggattaattagttttttgtaaaatggattaattaataggatgtgggtggggttagataagggaataaaagtaggttgtttcgttgggtgttagtggtttatatttgtaattttagtaatttgggaggtttagaggggtggattacgaggttaagagatcgagattattttggttaatatagtgaaatttcgattttattaaaaagataaaatattagttgggtgcggtggtgggtgtttgtaattttttttattggggaggttgaggtaggagaatggcgtgaattcgggaggcggagtttgtagtgagtttagattgtattattgtattttagtttgggtgatagagggagattttattttaaaaaaaaaaaaaaaaaaaaaaaaaaatgtaggttgtttgagttagtagtagtaattcgttttggtttttttttacgttgtggaagttttgtttttgtgttttttgtaataaattttgttgttgtttattttttgggttcgtatagtatttatttgttggtaatatcgatcgtagaggtttgtagttttatttttgaagttagcgagattacgaatttattaggaggaatgaataattttagacgggaggaacgaataaattttagatatgtcgttttaagagttgtaatatttatcgtaaaggtttgtagttttatttttgaagttagcgagattacgaatttattagaaggaggtaattttgaatacgttcgaatattagaaggaataaattttggatatattatttttaagaattgtattatttatcgtgagggttcgtaattttatttttgaagttagtgagattaagaatttattaatttcggatataagaatattcggtttttattgatggaaggttacgattttttagtagaaagagggtttaggtaaagaaaatgagagagagtttttggggtggtgatattattttgggaatatggagtgttaggaaacgataattggaagattaggatgaaatttgtaagttaaaaaatgatattatttatatattttttttattttattttttttttttcgagatttcgttaaagagattttggttagggatttttggttttggaaaggtattgttttttttttttgttaaatatttaatttttaggttatatttttttttttttttttcgagataaagtttcgtttttttaaagattagtttaggttggttttgaatttttgagtttaagcgatttttttgttttggttttttaaagtgttgggattataggtatgagttattattttcggttttagtttggataatttggtttgtataggtttttggtggagatagtaattaaagttcgggttgttaggtttgttttattaaagggattttgttgaggttgaaagaaaaaaaaatcgatgtggaggaaaagttaatttgtgttaagataaggtgagttagttatatggatttaataataatgttaattatgaaagttgaaggtttaggatttagttatttgattttattggttgtagatttaaggagtaggtagggttaattatagttttcgtgtttatatacgtttaagattaatgtttttgttgaaagaatttttttatatgttagttaaagagagttttttatggagatttggatatggtttagttaagttagaattttttattttttgtttttttttagttggtttattagttggaggagttttagaatatttaaattaatttttaattgtgtaatttgagaaaaagagacgaagattaatttttttaacgagtagggaagtgtgtttttttttttttttttttttttgagattgagtttcgttttgtcgtttagtttgaagtgtagtggtacgatcgcggttagtgtattgcgaattttgtttttcgggtttacgttatttttttgttttagtttttcgagtagttgggattataggtattcgttattacgtttagttaattttttgtgtttttagtagagatgggggttttatcgcgttagttaggatgatttcgattttttgatttcgtgatttgtttttttcggttttttaaagtgttgggattataggcgtgagttatcgtatttggtaggaagtgttttttaaagttggaaagtggtattttagaatattcgtttttggtagattgagttagttattttatttttttgattttttgtttaaggttttggtgaattgataaagattttgtttaaattttaacgattttagtaattatatgttatatgaatgaatatttgacgttagtaggattgcgttttggtggtgaatttggttttaggtagaaataaagaatggagaaaattgggggataattattttagggttttaaaaaagtgtttgatttttatagattttagggtttttaaaataatagttttaattgtagtgttttatagggtagtgtattatattgttaaaaatagtataggtttatggttttaatgattggtttattatttttaaaaatgtttaattgaatttaatttttttaaggagatagggttcggttttgttgtttaggttggtttttaatttttaggtttacgatttttttattttagttttttagattgttaggattataggtatgagttattatatcgggttaattttttattttatttttgagatagagtttcgttttattatttaggcgggagtgtagtggtatgattttggcgtat

SEQ ID NO: 11 - DNA, 5944 bp, Artificial Sequence
  chemically treated genomic DNA (Homo sapiens)
atttagttttatttatttattgagtattttttgtatatttggtattggggatgttattaagattaagataggattatgatagttatgtttttttaggaattagattttttttcgtttattattcgtgtttattttattttttttttattttttattttttttatttattttgttcgttttagaaatgtattatacgtaagtatttttttatttggttttataatttttatagtggaaatagttatattttggttttaaaaattgaaaataaagaagaaaagtattttattattatgtaaggggaaaaaagttagatttttttttatgattttgtataaggaaaaaaaaatgatttttttaattttatttgtatttatttttaagattacggtattgatttagttttttattttttttaaagattattttgggattttttttgttgttgtcgtttgtatttttttaatttattttttataatgttatcggtataatttttttaaaacgaaagtttgattttatgtattatagattcgaagttttttttcgtttttaaattttttaatagtagtggttgttagattgttggtttttataggtttagttgggttggtatttattttatttaaaatttattaaatatataggttacgtgatatatatatttttagagtttttttttttttattaagtatatggaagaagagagagaagattttgtttttattgtttttatagatggaaaaggagggaggggatgaggttggtcgaggattaagaagagggaagagaggatttatttggaagttgggttttcggagcggttcggaggcggcgtttttaggtatttgtttgtttttcgttttttgagggtacggggcgtttttttttttcgatttttttagttgttcgggttttttttgtttgttagtttttgattttcgtgatggtggttgcggttggttggttttcgtagggttcgggagcgttttgtttttcgtttcgtttttattttttcgtaggcggattaagtttttgcggtcggcggtaggcgaagtgattttataggttggtaggggtttttgggggtttttgtcgttttagggggagtagttgttgagggtgcgaggttttagagagtattgtatagttttgtttattcgcgggtttatttgtacgtttatttttttggtgttgggtttgtatagtcgcgggtttaggttggggtttatttgggagagaatggttttaagttgcgtttttttgtaagggttaatgtagtagttaggggcgttcgcgggtattagtagttttggtttggttagaaaagtgggaggatttatattttgtttttagtcgggttgtttgtgttttgagagtttaggttgtttaaaggtattgtgtttttataattttggtataagttatagggaatacggataaagcgttttattcgtttttaggtgtttaggcgtagtttaatattttagttagtttgtttgggtttttattttgttttttttttttattcgttttttttttttttttattaggttggtttagatttatttttggtttttttatttattttagattttaatgggagttgttgtttattattttgattgagggagagaagttttatttatagatgtttaattgttatttgatttttatttaattgtttttttttatttttttattgttcgggaattttttttttaaagttgttttttatttttagtttatttatatatatgttttaattagtgattaatttatatatttttgtagtgattattttaaagattttttgtaaggtaatgtggtaatgttagataatgttttaaggtatagttattatggataatagtatgaaggttttttaaaaaagttaatagaagtattagataatttagtaattttattattgcgtatttatttaaaggaaatgaaattaatattttgaagagatatttttatttttttgttcgttgtagtattatgtataatagttaagttatggaaataatttaagtgtttgttaatagaaaaatggatagagaaattgtggtatgtatttatataatggaatattatttagttttaaaataggagattttggttaggtacggtggtttatatttgtaattttagtagtttgggaggtcgaggtaggtagatgatttaaggttaggagttcgagattaatttggttaatatgatgaaattttgtttttaataaaaatataaaaattagtcgggtatggtggtacgtttttgtaattttagttattcgggaggttgaggttggagaattatttgaattcgggaggtaaaggttgtagtgagttgagattatattattgtattttagtttgggtaatagagagagaaagatttcgttttaaataaataaataaataaaaaataggagattttgttatttgtaataatatgggtgaaattggggaatattatgttaagtgaaataagttagatagaaaaatattgtataaatttattgatatgtggaatttgaaaaagttaaatatatagaagtagaaagtagaatggtggttattagggataggaagttggggggaatggagagagattggttagagtttaaaatgttatagttaggtagaatgaatgagtttagagatttaatttatagtataacgattatagttattaatattgtattttatattgaaaagttttaaagagaaattttaggtgtttttatcgtatataaaagaaaggtaattatgtgaatagatggatatgttaattgtttgattatagtaattattttattgtgtatatatatatgttgtgtatattaaatatatataatttttaggaaataatggttttttgggtttttgtttgtttgtttgtttgaaatggagttttttcgttttgttttttaggtaggagtgtagtggcgtgatttcggtttattgtaattttcgtttttggggtttaagtgattttttcgttttagttttttaagtagttgggattataggtatatgttattatatttagttaatttttgtatttttagtagagatagggttttgttatgttggttaggttggtttcgaatttttgattttaggtgatttgtttattttggttttttaaagtgttgtgattataggcgtgagttattatgtttagttggaaataatgtttttaagaaaaattaaagtatattgtaaattgaatataaatagtaaattgagtagttgtattagaagagaataggtgagaaagtttattatggtggagttaataagttgtaagtttttggtataaagagaataagaaatataaaggtatggggggttgtataaaatgatagaaaatgttatttttgagatttgtgtgatatgttacgggtttttattagtttatttttagtgagatattttttttttttaaaaaggggataaagtatattgttttgatttatagggtaaataaattataggttagttaagtgtatgaagttaaatggattagaatttaaatttgggttttattattaggtatattatttaattatttgatttagtatttttatttgataatattgattaatttataggattattgtaagattaaatatggtattgtttgaaaatttaaagtagaatgtttaatttataaaatgtttggtaagtggtagttgttattagtaaggattatagacgtatttttttgcgaattagagtaaaagttttagaatttatttgtattagtaaggtttttttttataattaaggattattgattattaaattaaaatggtttttaaggaattaagcggagtttattttttttttaatttaaagttgtttttgtttattgtttaagtattttttggaagtagtaaggtttttatgggagtaatttttattgaatttatttgaaggttttgtaggttttataataaattttatttagttttgtattaggtatgttatagaattaacgaattcggagatgaagttaggttttttagtttagtttgcgaggaagataggtgattcgaattttaagaatgtaaaagatgggttgggtgtggtggtttatgtttgtaattttagcgttttgggaggtcgaggtaggtagattatttgaggtcgggaggttgagattagattgattaataacggagaaatttcgtttttatttaaaaatgtaaagttagtcgtgcgtggtggtttatgtttgtatttttagttattcgggaggttgaggtaggagaattatttgatttttggaggcggaagttgcggtgagcggagattgcgttattgtatattagttcgggttataagagcgaaatttcgttttaaaaaaaaaagtaaaagatattattaagttttgcggagtaaggtattttatattttatgagcgagttaagatgggttttataattttttaagtaaggaaacgggttcggaggttttgaatatttgttatttaatagtagaatagttattggaattaaaattttttgattttaaataatagtttcgtttattattattaagtgaagttatttataattatatatcgattattttaagtttttgtaagatcggttcgttttggggaataggttttgagagaatattttttttaaggttagaataaaggtattttataggttttaggtcgtgtttcgagggcgtttatttaaatatgagttggagtaaaaagaaagggatgggggatttggagtaggtataggggcggtttttttaagtagggtggtttgggatttttaagggttagcgagaagagaatatatattttagttttcgttttattcggttagatattgacggttgggatgtttgataaggaattttttttcgttatattgagaaatattcgtagcggtttatttaggtttgattttcgggtggtgcgtgtgttgcgtgtcgcgttacggcgttacgtggttagcgcgggtttgtggcgcgagtttttgaaattaggcggtagaggcggagtcgttgtggtattgttgcgtttttgttgcgtttcgggtgttttttgcggcggtgggtcgtcgtcgggagaagcgtgaggggatagatttgtgatcggcgcggtttttgttagtttatttcggttaaaaaagaattgcgtttttggagcgggttagtggtggtggtagtgggttgggacgagcgcgtttttcgtagttttagtttagcgtggcgggggagcgttttacgtttcgggtcgttgtcgcggttttttgtttttttgtttttgttaatttttatttatgtttgagagaaaggtttttgttcgaaggtaaattttcgttaagtaaattcgagtttcgttttttttttgggtttttatttttcgttttcggttcggtttttgggtttcgtttttagtttaagatttaattttttttttagttgttttagatgacgttatttgaaattttttggaaatacgattattttaacggaatattgttgttttggggaagtgttttatagttgttgggtacgttgtatttgttttatttaagtttttggtaattgttgtatttcgaagatatgttgatgggaattattaggcggcgttggtttttaattggagttttttgtttttattagttacgcgttattggttagcgtgattgaaattaaatcgtatgaaaatttttttttttagtcgtattagttacgtttcgagtgtttaatgtggttagtggtatcggtttggatagtatagttgtaaaatgtttttatttttatagtaagttgttatcgttttaggagatgggattgaattagaatttaaataaattttttagcgtttttgagttttattttagttatataataaggaatgtatttttgtgtaagtgtattttggttttttgttttgtaga

SEQ ID NO: 12 - DNA, 5944 bp, Artificial Sequence
  chemically treated genomic DNA (Homo sapiens)
tttgtaaaatagaagattaaaatgtatttatatagggatgtattttttattatgtgattgaggtaaaatttagaagcgttggaaaatttgtttgaattttaatttagttttattttttggaacggtaatagtttattgtgaggatgggaatattttatagttgtgttgtttaaatcggtgttattagttatattaagtattcgaaacgtggttagtgcgattagagaagaggatttttatacgatttagttttaattacgttaattagtgacgcgtggttagtggggatagagggttttagttagagattaacgtcgtttggtaatttttattagtatgttttcggaatatagtaattattaggggtttaagtaaggtaaatatagcgtgtttagtagttgtaaaatatttttttaaaatagtaatatttcgttaaagtgatcgtgtttttaagaaattttagatggcgttatttgggatagttgggagggaagttaagttttgagttgaaggcggagtttaaaggtcgggtcggaggcgggaaatggagatttagggaaggggcggggttcgaatttgtttggcgaaaatttgttttcgggtaaggattttttttttaggtatgggtgggggttggtagagataaaagggtaagaagtcgcggtagcgattcggggcgtgaggcgttttttcgttacgttggattgggattgcggaagacgcgttcgttttaatttattattattattattaattcgttttagaggcgtagtttttttttggtcggagtaagttgataaaaatcgcgtcggttataaatttgtttttttacgtttttttcggcggcgatttatcgtcgtaaaagatattcgaggcgtagtagaggcgtagtagtgttatagcggtttcgtttttgtcgtttagttttagaagttcgcgttataagttcgcgttggttacgtgacgtcgtgacgcgatacgtagtatacgtattattcggaagttaggtttgggtgggtcgttgcgggtattttttagtgtggcgaaaggaaattttttgttaggtattttaatcgttagtatttgatcgaataaagcgggagttggagtgtgtgtttttttttcgttgatttttaagagttttaggttattttgtttggaggggtcgtttttatgtttattttaagttttttatttttttttttttgttttagtttatgtttgggtgggcgttttcgggatacgatttgggatttatgaaatatttttgttttgattttaaaagggatgtttttttaagatttgttttttaaagcgagtcgattttataaaagtttagagtggtcggtgtgtggttgtggatgattttatttagtggtagtgggcggggttgttatttgaaattagaggattttagttttagtagttgttttgttattgggtagtaggtgtttaagattttcgagttcgtttttttgtttgaaaaattgtgaaatttattttaattcgtttatgaagtgtgaggtattttgtttcgtagggtttggtagtattttttgtttttttttttgagacggagtttcgtttttgtggttcgggttggtgtgtaatggcgtaattttcgtttatcgtaattttcgtttttagggattaagtggtttttttgttttagtttttcgagtagttgggaatataggtatgggttattacgtacggttaattttgtatttttaagtagagacggggttttttcgttgttggttagtttggttttaatttttcgattttaggtgatttgtttgtttcggttttttaaagcgttgggattataggtatgagttattatatttagtttattttttgtatttttaggattcggattatttgtttttttcgtaggttgaattggaagatttgattttattttcgaattcgttggttttgtaatatgtttaatataaggttgaatagggtttgttgtaagatttataaaatttttaaatggatttagtgagagttgtttttatgggggttttgttgtttttagaaggtgtttgagtagtaaatagaagtaattttggattagaaaaagggtgggtttcgtttggttttttagggattattttagtttgataattagtaatttttagttgtagaaggaggttttattaatgtagatagattttaaagtttttgttttaattcgtaaagaaatacgtttgtgatttttattaataatagttgttatttattaaatattttatgagttaggtattttgttttgggtttttaagtaatattatgtttaattttatagtaattttgtaaattggttagtattgttagatgaggatattgaattaagtagttaagtaatgtgtttggtagtaaggtttaggtttgaattttagtttatttgattttatatatttaattaatttgtgatttatttattttataaattagaataatatgttttgttttttttttgggggggaggggtgttttattaggagtggattaatgagaattcgtggtatgttatataagttttagaaataatattttttgttattttatatagttttttatatttttatgttttttgttttttttgtattagggatttgtaatttattagttttattataatagatttttttatttatttttttttagtgtagttgtttaatttattatttgtatttaatttataatatgttttaattttttttaaaaatattatttttagttgggtatggtggtttacgtttgtaattatagtattttgggaggttaaggtgggtagattatttgaggttaggagttcgagattagtttggttaatatggtaaaattttgtttttattaaaaatataaaaattaattgggtgtggtggtatgtgtttgtaattttagttatttgggaggttgaggcgggagaattatttgaattttagaggcggaagttgtagtgagtcgaaattacgttattgtatttttgtttgggagatagagcgagggaattttattttaaataagtaaataaataaaaatttaaaaaattattattttttaaaagttgtatatatttaatgtgtataatatgtatatgtatatagtgagatgattattatagttaagtaattaatatatttatttgtttatataattattttttttttgtgtgcggtgagagtatttgaaatttttttttgaaattttttagtataaaatatagtattgataattgtagtcgttatgttgtaaattagatttttagatttatttattttatttaattgtaatattttaggttttgattagtttttttttattttttttaattttttgtttttggtaattattattttattttttgtttttatgtatttgatttttttagattttatatattagtgagtttatgtagtatttttttatttggtttattttatttagtataatgttttttagttttatttatgttgttgtaaatggtaggattttttgttttttgtttgtttgtttgtttgagacggagtttttttttttttgttgtttagattggagtgtagtagtgtgattttagtttattgtaatttttgtttttcgggtttaggtgattttttagttttagtttttcgagtagttgggattataggagcgtgttattatattcggttgatttttgtatttttattagaggtagggttttattatgttggttaggttggtttcgaatttttgattttaggttatttgtttgtttcggttttttaaattgttgggattataggtgtgagttatcgtgtttggttaggattttttgttttaaggttgaataatattttattgtataaatatatgttataatttttttatttatttttttgttaatagatatttagattgtttttataatttggttattgtgtataatgttataacgaataaggaagtgaaggtatttttttaggatattgattttattttttttgggtaaatacgtagtggtgggattattggattatttggtatttttattaatttttttaaggaatttttatattgttgtttataatggttgtattttaaaatattatttaatattattatattattttataaaggatttttagaatggttattataggaatatatgaattaattattaattaaagtatatgtgtgaataagttggaaatgaaaaatagttttgaaaaaaagattttcgaatagtgaagaggtagggaaaagtaattaggtaggaattaggtggtaattagatatttgtagatagagttttttttttttaattagggtaataagtagtagtttttattagaatttgaaataaatggagaagttaggaatgaatttgaattaatttgatgaagagaaagaaggggcggatgaaggaggaaggtaaaataaggatttaaataaattggttaggatattagattgcgtttgagtatttgagagcggatggagcgttttgttcgtgttttttatggtttgtattagggttatgggagtatagtgtttttgggtagtttggatttttagggtataaatagttcgattggaggtaaaatatgggtttttttatttttttggttaggttagggttgttggtgttcgcgaacgtttttgattattgtattgatttttataagagggcgtagtttaaggttatttttttttagatgaattttagtttgagttcgcggttgtgtaagtttaatattaaggaggtgggcgtgtaggtgagttcgcgggtggataaggttgtgtagtgttttttggggtttcgtatttttagtagttgttttttttgggacggtagagatttttaggagtttttgttagtttgtggggttatttcgtttgtcgtcggtcgtaggggtttgattcgtttgcggagagatggggacgaagcggagagtaaggcgttttcgggttttgcggaggttagttagtcgtagttattattacggaggttaggagttgataggtaggaggagttcgggtagttggaggaatcgggggagaaagacgtttcgtgtttttaggagacgaagagtaagtaggtgtttggagacgtcgttttcgagtcgtttcggaggtttaatttttaggtagatttttttttttttttttttagttttcgattagttttattttttttttttttttttatttatgggggtaataagagtaaaattttttttttttttttttatgtatttggtgaaggagagggagttttgaaaatatgtatattacgtggtttgtatgtttggtaagttttgggtaaaataggtgttaatttaattaagtttgtgaaaattaatagtttggtaattattgttattggagaatttggagacgaagaagggtttcgagtttgtaatatatgaaattagattttcgttttgggaagattgtgtcggtagtattgtggaaaatggattggaaaagtataaacgatagtagtaagaagaattttagagtaatttttaagagagatgagaaattgaattaatgtcgtagttttgagaatagatataagtgaggttaaagaagttatttttttttttttatataaagttataaagaaggatttggtttttttttttttgtatgatggtaaagtattttttttttttatttttagtttttggaattaaaatatggttatttttattgtaaagattgtaagattaggtgggagagtgtttacgtgtggtgtatttttggaacgaataaggtaagtaaaaagagtaggaggtgagaggaggatggggtgggtacggatggtaagcggggaagaatttgatttttgagggagtatggttgttatagttttgttttgattttggtggtatttttagtgttaggtgtataggaagtgtttagtgaatgaatggaattgaat

SEQ ID NO: 13 - DNA, 6113 bp, Artificial Sequence
  chemically treated genomic DNA (Homo sapiens)
ataaaaataaaattgtttttatttatagttgatataattatttatagagaatgtttaaaggatttgtaaaaggttttatttaagaattagtaggtgagtaaaataggttgtaagatatatgtttaatatggaaaaatttattgtattttaatataatagtaataaagaattagaaattacgttttttaaagtattatttataataataatataatataatatattttataataaatttaataaaatatattatgatttttatgttgaaaattataaattagtgataaatttttaaaaatgattaagtaaaaggtttttgtgaattaagttaaattgattttgatattaaattttatttttttaaatgttacgttatttaatttgttttttttgagtagtaaaaatattttgtgaggttaagtaggtattgttattttcgttttatagagtaagttggagttgttatggttaagtatttatatttttaggtatgtatttatggaaaatgaaaatttatgtttatacgaaatttatatgtgaatgttttttgtagttgtatttataattattaaaaattgtaagtaattaaatttaaatgttttttaatgagtaaatgaataaattggtatatttattaatatggaatattaattagtagtaaaaaggagtaaattattgatatacgtaatgaattttaaaggtattatgttgaatagaagaagttaggtttaaaaggttatatatggtataagtatatatgtgggatagttttaaatggaaaaaagtataatggtagagaataaattagtggttgttgaggttagggatgaggagagattgtaattataaaaaggtagtatgagggagttatttagggtgacggaattgttttgtattttgattttggtgttggttatattaattatatgtgtttaaatttatagaattatatattaattttaaaagttaattttattgtattttaaaaatagaatttaaaaaaattaattaatagtaaatagaaaattaaagaaaaaaaatgagatattataatatatttattagaagagttaaaattaaaaagattgattatattaagtgttgataaggatataggataattggaaattttatatatttttggtgggaaggtaaaacggtattattatttaggtagttttttaagaagttaaatatatatttaataagttgatttagttattttatttttaaatattatattaagagaaataaaaatataagtttatataaagatttatatatgaatgtttataatttatttgtaataatttttaattagaaataatttaaatatttatgaataggtgaatggataaataaattatggtatatatatataatggaatattatttagtattaaaaagaaataaattattgataaatataaaaatatggatgaattttaaaataattatgttgagtgaagaatttaaaaaataaaaaaaaaaaaagtagaatatgtgttgtatgtttttatttaaataaaattttagttaggcgtattgttttatatttgtaattttagtattttgggaggtcgaggtaggtagattataaagttaggagtttaagattagtttaattaatatggtgaaatttcgtttttattaaagatataaaaagttaattgggtagggtggtatatattttagttatttgggaggttgacgtaggagaattatttgaatttgggaggtagaggttgtagtaagtcgagatagcgttattgtattttagtttgggcgatagggcgagattttattttaaaataaataaataaaaataattaaataaaaattataaaaaatataaattaatgtatagtgttagaaattagatgagtgtttatttatggaagtagaagtataaggtaagattagaaaggagtataataaattgttgtggatattgaatatgttaatttttttgattgtgttgatggttttatagatatatatatatgttaaaatttattaaattatatattttaagtatgggtaattttttttgttaattatattttaataaaatttttaaaatgtaattataattatgtaagaaaatatataaattagtgagaatatgtaaaaataaaatatttatgttattgtagaatagatatgattgttaatttgaaattttaatggtattgtatttttatataaatgaatgatataaaaattggtataaatatatttgtttgttgttttttgggtttgtttttttttttttttttgaggtggagttttattttgttatttaggttggagtgtagtggtgtgatttcggtttattgtaatattcgttttttaggtttaagtgatttttttgttttagtttttcgattagttgggattataggcgcgtgttattatgtttagttaatttttgtatttttagtagagatggggttttattatgttggttaggttggtttggaatttttgattttaggtgatttatttatttcggttttttaaagtggtgggattataggtatgagttatcggatttagttataaatggattttttaatgggtaaaaggtttgaataatattttatcgaagatttgtagatagtaaataagtatatgaaaagattgttaatatttttaggtattaggaaaatgaaatttaaaattataatgagatattattatatatttattaaaatggttaaaataaaaataaaaatatatttaaaaattagataatattaagtgttggtgagggtgtggaaataattagaattttaatgtattgttggtaggaatataaaatggtatagttattttgaaaaatagtttggtagttttttataaagttaaatatatattgattatataatttagtaattttattattagatatttatttaagagatatgaaaatttacgtttatataaattttgtatgggaatgtttgtagagtttttgttataattatagaaattggaaatattttaatgttttttagtttgtgaatagataaattggtaaatttatataatggaatattattgagtaataaaaaggaataattattgatatatggatgaattttagttatattatgttatgtgaagtaagttagatttaaaagtttaaattttgtataattttatttatatgatattttagaaaagataaaattataggtttataaaatatattagtagttgttaaagggtgtgggaatgaattattaaggagttggaggaaattttgatggtgatggaattattttattatttgaatttagtgaggttattttatttatttgttaaaaataataaaattgtatattataaagggtgaatgttattgtatgtaaattatattttaatttaaaaaaatttagtttgatagtttgtatatttttaattttattgataatttatggaaaagaaatatttttttgtttgtaatttgttaagaaatatttaatattatgttatgttttttgtaggtttttttttttttttgtgagatatattttttgtttgatagaggagtttattagggaaataagtttaaatattaaaataagttatagaaaaaggttaggtaaaaataaattaattgagtgataaattatagaatatattttatatgtgtgggaaatgaatggtatataattttggaaaggttttagtgttttttaatattgttgattttatattatttttaatttttaagtgaggatgatgagatttggagaggataagtatttttttcgtgattttcgagttattaggtgttaaagttgagattttaatttacgttttttcgtttaaaatttgatattttttgtatgcggcgatggaataatatagaagaggttacgacggcggttatatagtgtgattttaatggatagtatcgtttttttattttttaaataattcgtttaattatttggtacgaattttatatagtaatattatgattattgttacgttttttaaattgagtttaacggggttttggaatgttaattttcgagaaaggaattagcgagttttgtggggatatggatttatttttgataagttttggtagtaaggaaggcgtatggggttagcgtcggagttagggtgttatcgaaaagggtaaatattaagaaagaagatagtcgaggcgttgaagatatttttttttaattatattatttagttttgggttataaggcggggaatagcgtacgaaaaattttttttttggtttttttagtttttttggtgaaagattttcgtggatttttttttgttttcgtcgttagtttagggttaaaattgaggtttttttataggcgtggttgggaggaaagtggtggtgcgttttaatagcgtaagtagttcggggtacgtcgggggaaggcgttgggtagtagggatcgcggacgtacgaggtcgggttaaggcgtttagagtcgggtcgggtagggtttcgatgttagagtgaaggggtcgataggggagaacgaattcgggaaatttttttcggtgatattttaagtgtcgtatgatgcgttagttgattaggggtttttattttttttttttttattgatttcgtaattattgattacgtaatcgttgtttacgtcgttattttatttttttagtttttgtattgcgggatgtagtagtatttgttttcgaattggttcgtgtttacgtgtttttttattttttttgatagcgatttttataaggcgcggaataaattttgagattaatttatgtcgtttatttagtttttagcgttgttagtagcgggattcgtagtaggggtaatgttttagtcgtcgatttagtttatcgaggcggagaagttaggtcggtttttattttggagtttttttagtaacggcgtttattattggtcggatatattatcgattgattaatgggagattttgttgttttagtttcgtttttgagttttgttatggcgacgtttagtgttttagtcggtgtgaggatacgatatgttggggtttttgttcgtacgttaaacgggtttggaggatttttttcgttttcggagagtagagttaatacggaggtaaagaaaattttattttttggttaataggttagttagaatttggattaatgattgtaagttttgttttatattttttcgttttatcgtttttttgttattaaattattatttgttttttaatgttgtgtggtttgttaaaataggattttttttatttattggtaataatttgtaggcgggggggcggcgggggtgggggggggtttttcgggggtggggggggttttttcgcgggtttaggtgaagatattataaatttaaataagaatatttcgttgtattgtatttttttttttttaagttattttaaagaataattgttttttacggattcgtttatttatttagtttgtatatttagtgaatttttatagtgtgttaggtagtttattaaaggtagaggatataggttaggaattgaataaagtttagaatgattagagcggagaattggggtagggattattgataagagatgaagtagatagaaattagatgaggaagagttttgtgtatttgagtagaggtgtgaagatgagaataaggtaatagttattgtattttgttttttgtttggagaatgggttgtaattgagaataagagtgggagttaagttaggtaattgttgtgattatatttgttcgggagagagttgttggaagtttgggttatagagttgttaagtagaataaagatagtggagagatttgaataacgtttgagaaatagaattaataggttatggaaattgagtggatacgtgaatgataaaaagagaagaatgaataatgatttttagatttatgttttgtataagaagttgaatgttggtaatatattttgagagagggttttttaaagggaagaagtaagttgtatttttaattttgtttatattaattgaggaatttgtgaagatatttatttggagaatatagttgtttatgagttttgcgttttggagaaatttaaatattagtttttaatattttattt

SEQ ID NO: 14 - DNA, 6113 bp, Artificial Sequence
  chemically treated genomic DNA (Homo sapiens)
ggataaaatgttggaaattaatatttaaatttttttagaacgtagaatttataagtaattgtgttttttaagtaaatatttttataggttttttaattaatgtgggtaaaattaaaagtataatttgttttttttttttggaaaatttttttttagagtatattattaatatttaattttttatataaggtatagatttgggaattattatttatttttttttttttgttatttacgtatttatttaatttttatggtttgttgattttattttttagacgttgtttaaatttttttattatttttattttatttggtaattttgtggtttaggtttttaataattttttttcggataagtgtaattataatagttatttaatttggtttttatttttgtttttagttgtaatttattttttaagtagaaaataaaatgtaatagttgttattttatttttatttttatatttttatttaagtatataaggtttttttttatttagtttttgtttattttattttttgttaatggtttttattttaatttttcgttttagttattttgaattttgtttaatttttggtttgtgttttttgtttttaataggttgtttggtatattgtaggaatttattaaatatgtagattgaatgaatgaacgagttcgtggagggtagttattttttggagtaatttaagagagaaggaatatagtataacgaagtatttttatttaggtttatagtgtttttatttgagttcgcgggggaattttttttattttcggggaatttttttttattttcgtcgttttttcgtttgtaagttgttattagtaaataaaagggattttattttagtaagttatatagtattagagggtaaataatagtttggtggtaggagagcgatgagacgggaaagtgtggggtaaagtttatagttattggtttagattttaattggtttgttagttaaaaagtaaggttttttttattttcgtgttgattttgtttttcgaaggcgaagagggttttttaaattcgtttggcgtgcggataaaaattttagtatatcgtgtttttatatcggttggagtattggacgtcgttatgatagagtttaggggcgggattggaatagtagagttttttattggttagtcggtgatatattcggttaatggtgagcgtcgttattagaagggttttaggatggaggtcggtttgattttttcgtttcggtgggttgggtcggcggttggagtattatttttattgcgggtttcgttgttggtagcgttggaaattgggtggacggtatgggttggttttaggatttgtttcgcgttttgtggagatcgttgttaagggaagtgaaagagtacgtgggtacggattaattcgggaataaatattattatatttcgtagtataagaattggagaggtgaggtggcggcgtgggtagcgattgcgtggttagtgattgcgaggttagtaaaggaaggaaaagtgagagtttttagttaattaacgtattatgcgatatttagggtgttatcggagagaatttttcgagttcgtttttttttgtcgatttttttattttggtatcggagttttattcggttcggttttgggcgttttggttcggtttcgtgcgttcgcggtttttattatttagcgttttttttcggcgtgtttcgggttgtttgcgttgttaaggcgtattattattttttttttagttacgtttgtagaggagttttagttttagttttggattggcgacggaggtagggaaaagtttacggaaattttttattaaaggggttagaagggttaggggaggggtttttcgtacgttgtttttcgttttgtgatttagagttgagtggtgtaattgaagaggagtatttttagcgtttcggttgtttttttttttggtgtttatttttttcggtggtattttggtttcggcgttggttttatgcgttttttttattattaagatttgttagaagtaggtttatatttttataaggttcgttgatttttttttcgggagttgatattttaagatttcgttgagtttaatttaagaaacgtggtaataattatggtgttattgtgtaggattcgtgttaagtagttgagcgggttgtttggggagtaaggaggcggtgttgtttattgaaattatattgtgtagtcgtcgtcgtaattttttttgtgttgttttatcgtcgtatgtagaaaatgttaggttttgggcgaagaggcgtgggttagaattttagttttgatatttgatagttcgggaattacggaaaaagtatttgttttttttaagttttattatttttatttgaaagttagagataatataagattagtaatgttgagaagtattaagatttttttaagattatgtgttatttattttttatatatataaaatgtattttgtgatttattatttaattaatttatttttgtttggtttttttttgtaatttattttaatatttagatttgtttttttaatgagtttttttgttaggtagggaatatgttttataaaaaaagaaaaaagtttgtaaagaatatagtatggtgttaagtattttttgataggttgtaagtagagagatgttttttttttataagttgttagtaaaattaaaaatatgtaaattgttagattgagtttttttaaattgaaatataatttatatatagtaatatttattttttatggtgtatagttttattgtttttgataaatgagtagagtaattttattggatttaagtaatagaataattttattattattagaattttttttaattttttagtagtttatttttatattttttggtaattattgatgtgttttatgggtttatagttttgttttttttagaatattatataaatggaattatataggatttagatttttgagtttggtttgttttatatagtataatgtagttgagatttatttatgtgttagtagttgtttttttttattgtttagtagtattttattgtatgggtttgttagtttatttgtttataagttgaaggatattaggatgtttttagtttttgtgattgtgataaaagttttataaatatttttatataggatttgtgtgaacgtaagtttttatattttttgggtaaatatttagtagtgggattattaagttgtgtgattaatgtgtgtttaattttatgagaaattattaaattgttttttaaagtggttgtattattttgtatttttgttagtaatgtattaaaattttagttgtttttatatttttattagtatttagtattatttgatttttgggtgtgtttttatttttattttagttattttgataggtatatagtggtattttattgtgattttaagttttatttttttaatgtttgaggatgttgatagtttttttatgtgtttatttattatttatagattttcggtgaagtattgtttaaattttttgtttattaaaaaatttatttatggttgggttcggtggtttatgtttgtaattttattattttgggaggtcgaggtgggtggattatttgagattaggagttttagattagtttggttaatatggtgaaattttatttttattaaaaatataaaaattagttgggtatggtggtacgcgtttgtaattttagttagtcgggaggttaaggtaggaaaattatttgaatttgggaggcggatgttgtagtgagtcgagattatattattgtattttagtttgggtgatagagtgagattttattttaaaaaaaaaaaaaaaaataagtttaaaaaataataaataaatatatttatattagtttttgtattatttatttatatagagatataatattattaaagttttaaattaatagttatgtttattttataataatatgaatattttatttttatatatttttattaatttgtatatttttttatataattgtaattgtattttgagagttttattgaagtataattgataaaaaaaattgtttatgtttaaaatgtataatttggtaagttttgatatatgtatatatttgtgaaattattaatatagttaagaaaattaatatatttaatatttataataatttgttgtgtttttttttagttttgttttatgtttttgtttttatggataggtatttatttgatttttgatattatatattagtttgtattttttataatttttatttagttatttttatttgtttattttgagatggagtttcgttttgtcgtttaggttggagtgtagtggcgttatttcggtttattgtaatttttgttttttaggtttaagtgatttttttgcgttagttttttaagtaattgagatgtgtgttattttgtttagttaattttttgtatttttagtagagacggggttttattatgttggttaggttggttttgaatttttggttttgtgatttgtttgtttcggttttttaaagtgttgggattatagatgtgagatagtgcgtttggttagaattttatttaagtggaagtatatagtatatattttgttttttttttttttgttttttaggttttttatttagtataattattttgagatttatttatgtttttgtgtttattagtagtttatttttttttaatgttgagtaatattttattgtatgtatatattataatttgtttatttatttatttgtttatagatatttgggttgtttttagttaggggttattataaataaattatgaatatttatgtgtaagtttttgtatggatttatgtttttattttttttgatgtaatatttagaaatggaatggttgagttaatttgttaggtgtatgtttaattttttaagaaattgtttaagtggtggtatcgttttatttttttattaggagtgtatgagatttttagttgttttatatttttattaatatttggtatggttagtttttttaattttagtttttttagtaggtgtgttgtggtattttattttttttttttagttttttgtttgttattagttggtttttttagattttatttttaaaatatagtaaaattaatttttaaaattggtgtatagttttataaatttgaatatatgtgattgatgtaattaatattaaaattaggatatagaatagtttcgttattttgaataatttttttatgttatttttttgtagttataatttttttttatttttaattttagtaattattgatttgttttttgttattatatttttttttatttgagattgttttatatgtatatttatattatatgtaattttttggatttggttttttttatttagtataatgtttttgagatttattacgtatattagtagtttgtttttttttattgttgattagtattttatgttaatggatgtattagtttgtttatttatttattaaagggtatttgagtttagttatttgtagtttttggtgattatgaatatagttgtaagaaatatttatatatgggtttcgtgtgaatataagtttttattttttatgagtatatatttaagagtgtgagtgtttggttatagtagttttagtttattttgtaaaacggaaataatagtatttatttagttttataaagtatttttgttatttaagagagataaattggataacgtagtatttaagagaatgggatttaatgttaaaattagtttgatttaatttatagagattttttatttggttatttttaaaaatttattattgatttgtagtttttagtatagagattatgatatgttttgttaaatttattataaagtatattatattgtattgttattataaatgatgttttaaaaaacgtaatttttaattttttgttattattatattgaagtataatagatttttttatgttgagtatgtattttgtaatttgttttatttatttattagtttttgaatgaagttttttgtagattttttggatattttttgtaggtaattatattaattgtggatagagatagttttgtttttat

SEQ ID NO: 15 - DNA, 5826 bp, Artificial Sequence
  chemically treated genomic DNA (Homo sapiens)
attaggggtttttttttgagtaaaaagaaaagttattgataattttgggttaaggaattgattgggatttgatttattatttataggattatttcggttgttggaggtgaagggaggaaaggtaaaagtagagggagattagttgttatatttttttaggtgggagatgatgttggtggtagtggtgatgagaaatggttgaattattttatattttgaaatggagtttataggatttattgatggattggatgtggttgtgagaaaaaggaattaagaatgatattaaggtgtggggggttgaatagtgggaagaatggagttgttattgatttattgtaggtatagatttggttagataattaggagagtaataattgttattttaagtttaagatgtttattatatattgatgtagatatgatgaataagcgttgaggtttagaagagatgattgattaggtttgaaatatatttgggagttattagtatataaataattaaggttatgggattatatgaggttattaagagagtgagtatagagaagaggtataagtatgagttgttaagaagttaggaagaagaaaattttgtaatgaagttgatgggtgaatagaattgttttttttattttagagagagaaaatttataaattggttgggcgtagtggtttatatttgtaattttagtattttgcgaggttaaggtgggaggattgtttaagtttaggcgtttgagattagtttgggtaataaagtaagatttcgtttttttggaaaattttaaaattaggttggtgtgatggtatgtgtttatagttttaggtatttaggaggttgaggtaggaagatcgtttgagtttgggagtttaagattgtagtgagttatgatagtgttattgtattttagtttggatgatagaggatgattttgttttaaaaaagaaaaaaaaaaaagtaaatttataaatttgtttaaggtgtaaaaataatttattagtggttaattattaatttagattatttattttttttattagtgattaggttataaagtagagatttttagaatattttttttatgatagaagttttttgatacgtatcgatagagaggtgaggggttagggggtgttgattttgaagaatgttttagttagtttttttatttgatttttttattggttgggttttgtttggttggtgaaatgtgagtagttgatggtagtataaggtggttagtttaaagtttaaattaatattatgattattattatgatttttaatagttgaagagaatttttataggataaggatttattgaatatataaaaaagatggtattaagaatattatattagttttttgttgttgtttttgtttttgttttgagacggagttttaattttgttatttaggttggagtgtaatggtattatttcggtttattgtaatttttatttttagatttaagtgatttttttgttttagtttttcgagtagttaagattataggtgtttgttatcgcgtttggttaatttttgtatttttagtagagttggggttttattatgttagttaggttggttttaaattttttagttaggttggttttaagtttttgattttaggtgatttattcgttttggttttttaaagtgttgggattataggtgtgagttattatatttggttttaattaatttttgtatttttagtagaggtggggttttattatgttggttaggttggttttgaatttttgattttaggtgattcgatttttttagttttttaaagtgttgggattataggcgtgagttattgtatttgattaggaattttatgatttttaataagaaaaaataatataatataattttaggtaggtggaaaatatatttattatagttgaattgatttttttttttgatgtggataatgatttaatattgaaataataagtattatattttttttagatgttaaagtattgattgttttttgaaagaaagaaagaataattttgtattatggaattagtagtaggaatgtatgtaggataagtatgattaaaatattaaaaagatttttaatatgtaaagtaagtagtagtgttaaaataattgaataatttttgagtatatatttttatatgatttttaaatataattatttggtatttttataaatattattataagagtattttatttttgtgtatttggtagttgttagagttatttgtagtggtttttaaaatgatattatatattggagttattatattgattataaagaaatatatatatatatataatattgatataggaaaatttttttgatttattattgattattaatgttttttaggattaataaatagttaatgataaattaattatgtttattttaatgtgtaattataatttaattgtgtagttaaatgtagtttttatttttagttatgaggtttaattttgaagataattattgagaaaatattttaggtatatttagtaattaggtaaaatgatgtaacgtatttgagttagaaagtatgataaatgaatatttttgtatattggaagtttaagtttattttagagaaaatttttaaaatatttgggtaaataattttttgatgaagttaaatatagtatgtagtataatttttgagtggaggattaagtttataataagaagtaattatttgatattatatttttattggatatagtcgatttgggtggggtattttaggattgtggtttatttgaattggtgtaaataatatatcggttttattgttttatagtttttatttagatgattgaagttatgggatttttagtatagttagttgatgatagtgtatattattttgttttaaaatttagtttaagtatggatatattaataagagtttaagttttttaaaggtaaaggattaggaattgtatagtttttggtatagaagaagataggtaaaagtgtttttgaattaacgttaaatgtgtaatatgttagaatttatgtaatgtataggattgtaggattttgatattttatttaatttttaaattttatttaatttaataaattttgattgtgtttttattaaatgtaggtattgtattaggagttgaggatattaaattgatgaagtttttgttgttaagaaatttatatgattttttaattttttgttagtttgttgtgattatattttttttttaagaatttttaagaaatgtttagtggatagaattttggagttttacggaatatattaataatcgttaaatgatgatttaggttagattgtgtaatttaggttttgtttgtaaaattgaaaatgtttcggtaatttatttaaattttaatgttgaggaattttttaagaaagatattaaatgttaagatttaaggtatagatatgagatatatagttatgtttaggtgaattatgtattgattatgattatttttttatttaaatgttgtttatggttgataatatagtgaaaaaatgagtgtaaaatgataatttaaataaatgaattagaaaatttattattttttttttttattaaattaagattaagagagttggagaatattttgtttagagtgataaaaatataagggtgtaaaatttttaggtatttttgtagaaattatttttgtgatttttggttgtatagtaattttaataatgtaagtattgttttgaatgtaagtatgtgggagttatttttattatttttgatgattttagtaggtttaagaaatgtttttgtttttattgtataaattataaaataaaggaagggatttttgaattatttagtgagagtttatatattaaagtttgttttttaaaaatgtgtaattattatttgtagttttaaaggtttgttttttatttataagttgttattattttaaaggtgaaattttagtatatgattaaaaattttttatagttatagttttatgatttagtatttaatattaataatttatagtgagattataggaggttttttgtggaaggtaacgatatatatacgttaggaaaggaagtttagggtatatcgagagtattttgaatttagatttgtgggttgtgtgggtgttagatggttgttttttagttggtgggcgtttagaaggatttttgtttgggtaaggttttttgagaaaggagaatttgggttgttagggatttttatatgtggttattagttttttacgtagattagtttacgattttttagttatatcgggtaggtgggaaatcgttttgttttttgtggaaaagattttaatttggttttttgttatttttgaatataaacgggttggtttttttttttttagtttttaatttttgtagttttttaaaaataaattaaattagttattagggtatcgaaataatattattgttaataagtagtttcgtttagatttagataaataatatttttgaggtaaattttgtttcggaggtttggagatatttttttaatgtaatttgtttattaataattattagattttagtgtattaattttggaaatagattttaatagttattttttaaaataaaagatatgaaaagataataagaaaaaagtgtcgtaattattatagaaaaatatttggtagtttgttttagtttaagttgaggttatttttagtttttgttaaagttttttatttttaatggttttcgttaatcggataagagtgcgcgcgggattcgtttttttttttcggtatcgttttcgttttcgttttttcggttcgtttttcgcgtggtttttttttttttcgttttttttaatttgattttaggagttggggttaaattgttggagtaggttgatttgtatagtttaatggttaagttgtatgtaaatgaggcggaaggtggttggttgagggttggtaggataatttcggagagcggggttttttgttttttagtggttggtaggtagtggttgggaggtagcggtttaattagtgtcgtgcggttcgtggcgaggcgaggttcggggagcgagcgagtaagtaaggcgggaggggtggtcggagttgcggcggttggtataggaggaggagttcgggcgggcgaggggcggtcggagagcgttagggtttgagttgtcggagcggcgtttgtgagtgagtgtagaaagtaggcgttcgcgcgttagtcgtggtaggagtagttcgtacgtcgcgttttttttttgggcgatttgtagtttgtaatatgattttggaggaattttcggttggagagtagaagatcgaaaggtgagtcggtttgcggattttttcggttcgaattttttttatttatttcgcgtttttcggtgtagtcgggttgtggaaggtttgtaggggaggaagttaaaaagtttgtatagggtaattttcgtttttgttttttcgggatttttcgtggagtttttacggattgaaagagcgtgttttttaattcgaacgagtttcgtcggggtttttgtaaagggtagtagtggtcgtcgttgttcgtgcggttttcgtggttggtagtttgtggtaggggtattttcgggattttttacgggacgttcggtttttgggcgtgtaggggttatggggggtgacggggtcgcgggagcgtcgggttttcgtagagtttaggtgcgcggtggtgtttgtattcgagagggaggggcgtggtatcggacgaggggggcggcgatggtttcgagggtatcggggttgacgggatttttcgtttttgttcgcgtgtagg

SEQ ID NO: 16 - DNA, 5826 bp, Artificial Sequence
  chemically treated genomic DNA (Homo sapiens)
tttatacgcgggtaagggcgaggggtttcgttagtttcggtgttttcggggttatcgtcgtttttttcgttcggtattacgtttttttttttcgaatgtaagtattatcgcgtatttgggttttacgaaaattcggcgttttcgcggtttcgttattttttatgatttttgtacgtttaaggatcgggcgtttcgtgagaagtttcgagagtgtttttgttataggttgttagttacgggagtcgtacgggtagcgacggttattgttgttttttgtaaaggtttcggcggggttcgttcgggttggggggtacgtttttttagttcgtgggagttttacggagagtttcgagggagtaagggcgggagttgttttgtgtaaattttttagtttttttttttgtaagttttttatagttcggttgtatcggggagcgcggggtaggtaagagaagttcgggtcggaagagttcgtaggtcgatttatttttcggttttttgttttttagtcgagaatttttttaaagttatattgtaaattgtaggtcgtttagggagagagcgcggcgtgcgggttgtttttgttacggttagcgcgcgggcgtttgttttttgtatttatttataggcgtcgtttcggtagtttaggttttggcgtttttcggtcgtttttcgttcgttcgggtttttttttttgtgttagtcgtcgtagtttcggttatttttttcgttttgtttgttcgttcgtttttcggatttcgtttcgttacgggtcgtacgatattaattgggtcgttgttttttagttattgtttattagttattggaggataaagggtttcgtttttcggggttattttgttaatttttagttaattatttttcgttttatttgtatgtagtttggttattgggttatgtaaattagtttgttttagtaatttgattttagtttttggagttaggttgagaggagcggaaaagggaggagttacgcgggaggcgagtcgagggggcgggggcgggggcggtgtcgagaggggaaggcgggtttcgcgcgtatttttattcggttggcggggattattgggagtggggggttttagtagaggttagaggtggttttagtttgggttgaagtaggttgttaagtgtttttttataatagttgcggtattttttttttattatttttttatgttttttgttttaaggggtggttattaaaatttatttttagggttaatgtattgaagtttagtaattattagtaagtaggttatattaaaaaagtgtttttagattttcggggtaaagtttattttagaagtgttgtttatttaagtttaggcgaagttgtttattagtagtagtattatttcggtgttttgatggttggtttgatttatttttggaaagttgtaagggttggaagttgaaaaaagaaaaattaattcgtttgtatttagggatggtagggaattaagttagaattttttttatagaaagtagaacggttttttatttgttcggtgtaattgggaaatcgtgagttggtttgcgtggggagttggtgattatatgtgggaatttttggtaatttagattttttttttttaaagagttttgtttaaataaggatttttttggacgtttattagttgagagataattatttgatatttatatagtttataagtttaaatttaaaatgttttcgatatgttttaagtttttttttttaacgtatgtatgtcgttattttttatagagagttttttatgattttattgtgaattattgatgttagatgttgaattatgaagttgtaattataggaagtttttagttatatgttaaaattttatttttgagataatggtaatttgtaggtggaaagtagatttttaaaattgtaaatggtagttatatatttttgaaaaataaattttaatatatagatttttattgagtagtttaaaagtttttttttttgttttatggtttatgtaataaaagtaaaaatattttttaaatttattgaagttattaaaagtggtgaaaatggtttttatatgtttgtatttaaaatagtgtttgtattattaaggttgttgtatagttaaaggttatagaagtaatttttgtaaaggtatttggaagttttgtatttttatgtttttattattttagataaaatattttttagtttttttgattttaatttggtggaaaagaaaagtgataggttttttggtttatttatttgagttgttattttgtatttatttttttattgtgttgttagttatggataatatttgagtaaagaaatggttatggttagtgtataatttatttaagtatgattatgtattttatatttatgttttaaattttaatatttgatgttttttttaaagaattttttaatattgaaatttaggtaggttatcgaagtatttttagttttgtagataaaatttgaattatataatttagtttgagttattatttggcgattgttaatatgtttcgtggaattttaaggttttatttattaggtattttttagaggtttttgggaagaaaatgtgattatagtaagttgataaagaattagggaattatgtgagttttttgatagtaaggattttattagtttggtgtttttagtttttagtataatatttgtatttagtagaagtatagttaaggtttattgagttgaatagaatttgagagttaaataagatattagaattttgtagttttgtgtattgtatgaattttaatatattgtatatttaacgttagtttaaaaatatttttgtttgtttttttttatattaagaattgtataatttttggttttttgtttttaaagagtttaggtttttattggtatgtttatgtttgaattggattttgggataaaatagtatgtattgttattagttagttatgttgaaagttttatgattttagttatttgaatggaggttgtaggatagtagaatcggtgtattgtttatattaatttaaatgaattatagttttaaagtgttttatttaagtcgattatatttagtaaaaatgtgatattaaatggttattttttattataggtttagttttttatttaaaaattatattgtatgttatatttgattttattagaaagttatttgtttaagtattttggggattttttttgagataagtttgggtttttagtatgtaaaaatatttatttgttatattttttgatttagatacgttatattattttgtttgattgttgagtatatttagaatgtttttttagtgattatttttaaagttgggttttatgattggaagtaaaaattgtatttagttatatagttagattgtagttatatattagaatggatatagttgatttattattaattgtttattagttttggaggatattgatagttaatggtaaattagagaaatttttttatattaatattatatatatatatatatttttttataattagtgtgataattttaatatgtgatgttattttaaaaattattataggtaattttgataattgttaagtatataggagtagaatgtttttgtagtaatgtttgtaaagatattaaatgattatatttagaaattatatggaaatatatatttaagaattgtttaattattttagtattgttatttgttttgtatattaaagatttttttgatattttagttatgtttattttatatatatttttattattggttttataatgtagaattatttttttttttttttaaaaaataattaatgttttaatatttgaaagaaatataatgtttgttattttagtattagattattgtttatattaaaggagaagattagtttaattatgatggatgtattttttatttatttagaattgtattgtattatttttttttgttaaaaattataaggtttttggttaggtgtagtagtttacgtttgtaattttagtattttgagaggttgaggaggtcggattatttgaggttaggagtttaaaattagtttggttaatatggtaaaattttatttttattaaaaatataaaaattagttggggttaggtgtggtggtttatatttgtaattttagtattttgggaggttaaggcgggtggattatttgaggttaggagtttgagattagtttggttaaggagtttgagattagtttggttaatatggtgaaattttagttttattaaaaatataaaaattagttaggcgcggtggtaggtatttgtaattttagttattcgggaggttgaggtaggagaattatttgaatttggaggtggaggttgtagtgagtcgagatggtgttattgtattttagtttgggtgataagattgaaatttcgttttaaaataaaaataaaaataataataaaaaattagtataatatttttaatgttattttttttgtgtgtttaataaatttttattttgtggaaattttttttagttattaagaattatggtagtaattatagtgttaatttgagttttgggttggttattttgtgttgttattagttgtttatattttattagttaagtaaggtttagttagtggagaagttagatgaagagattaattagaatattttttaagattaatattttttaattttttatttttttgtcggtgcgtattagaaggtttttattatgggaggaatgttttgagagtttttgttttgtagtttaattattggtgagggaagtaggtggtttgagttggtgattggttattggtaggttgtttttgtattttgaatagatttgtgagtttgttttttttttttttttttttgagatagggttattttttgttatttagattagagtgtagtggtattgttatagtttattgtagttttgaatttttaggtttaagcgatttttttattttagttttttgagtatttgggattataggtatatgttattatattagtttaattttaaaattttttaaagaaacggggttttgttttgttgtttaggttggttttaaacgtttgggtttaagtagtttttttattttggtttcgtaaagtgttgggattataggtgtgagttattgcgtttagttaatttgtgagttttttttttttgaaataaaagaaataattttatttatttattaattttattgtaaagtttttttttttttaattttttaatagtttatgtttatattttttttttgtatttatttttttggtgattttatatggttttatggttttaattatttatatgttgatgatttttaaatatattttaaatttggttagttattttttttgaattttagcgtttatttattatatttgtattaatatatagtaagtattttaaatttaaaatgataattgttgtttttttgattgtttggttaaatttgtgtttataataggttaatggtaattttattttttttattgtttagttttttatattttggtgttatttttgattttttttttttataattatatttagtttattagtaaattttataggttttattttaaaatgtaaaataatttaattattttttattattattattattagtattattttttatttaggaaaatgtaataattggtttttttttgtttttgttttttttttttttatttttagtagtcgaagtgattttgtaaatagtaagttagattttagttaattttttaatttaaagttattaatggtttttttttttatttagagaaaaatttttagt

SEQ ID NO: 17 - DNA, 5227 bp, Artificial Sequence
  chemically treated genomic DNA (Homo sapiens)
ttgttttgtttcgttttaaaggtttttcgggtagtgtgttgggatttgattcgtttttttaggttaatatgttataatacgattttagtttgttaagttatatgatttttgtttgttattgataatttggtttgtttttaggttaggggagattatttggtttattttttatattatttttatttttagagaggaaatggaggtgtggagtagcggagtagtttaattaaagatttgttattgttatattattttagttataatcggttttgtgatagtttttatttaaattttggttgtttttatgagggtatgataggatatgtaataggttattatatggtttttgtttttaaggtataagaaaaatattttgtattttgggtggtgcgttttatttttggttaagttgtttttaagtttatggtttttattttatttttataatttttatttttaatttataaataaggacggtaagattttttggtaagtgatggggagttgagtttaaaatcgcggtttcggtttttttagtttagggtagttttgcgttgaagtgtatttatacgtttcgggatgagatttcgttgtaaatttcgattcgaatatttaggaggtaggtttgtgtcgcgttttttatatagggagttataggatttgttgtttggtatagtaagagagggttttggagaaagttataggagtatcgtgggggaaaataggtggttaaatagaatcgggtttattgggtaaaatatatgatttttggtaggttgagggtttattaattataaggtaaaagttaagggcgttgttttgagagaagcggaaaatgattattaagggattttagtatttcggttttttttgggagatttacggggttagaataggagattattttcgtttttttgtttgtttgttttgttttttgtttttggtgaaacgtagtttcgttttgttatttaggttggagtgtagtggcgcgatttcggttattgtaatattcgtttttagggtttaagcgatttttttgtttttgtttttagagtagttgggattataggcgcgtattattatattcggttaatttttgtatttttagtagagacggggttttattatgttggttaggttgatttcgaatttttgattttaagtgattcgttttttttagttttttaaagtgttgggattataggcgtaagttattgagttcggttaggagatttttttaagaagattcgagatgtcgataattttagtggatggatattaattttaaaaagaaaagtttaaaaggtttatgtgtttattagttgggaggggttaagaaatatgggagttttttatagtgggggtaaaacggcgggtaaagttaggtgggcggaatagtagtttttgggggagataagcggtaaagaggtttacgatcgattaggggcgattaaggttgatagtcgttggggtcgttgggcgtcgggagttggcgtttcgttttttttttttttttttatttttcgtattttttattattttcggtgttttttgcgcgtgcgcgtgtagatatcggttgttaaatattgtattattttcgttttttttttttttttttttttttcgttatattttttttcgcgcgcgcgtatgatttatttatttttttcgtgaagtttcgtgatttaaagttattttcgggttcgatattacgtcgattttttagcgagagggagcgacgggggcggtgtcgcggggtttttgagtggcggatgcgagggacggggcggggttaatgtcggcgtgttattttttgattggtaggttttggggtttcgtttttgagaggagggtaaggttatggtaaaagattatagttaggcgttttcgaggttagagatttaagtttaaggtattgagcgtattatgttaaagatgagcgggtggtagcgatagagttaaaattagagttggaatttgaggagagaggcgagtattgatttttatttattttttattttttcgtttttttaaagttggggcgttcgttttttaggatcggttttatttttttatagtgaagttagggatcgttcgagagaggaatggggagagttttttattttggggtggtgtttataaatttttattgtttcggacgacggcgtttttttatttttgttcggagtcggaatacgggttttgttttgtgttgttgggtaaagggatttcggttgtttttgggaaatttattttttttcgtagttaattttaggttttatcgttaggtttgttcgcggggaggtaggttagtaggatatattttcgttttaagattgggtgattatcgtttaggtcgttttcgtcgtttcgttattagcgggttttttttttattttatttttaattttgttttagttttagtgtttttggtgttagtatggttattttggtagttggggttattggattttgtagcggataggggaattttgaggagatataagtttttgggaggggtgtcgatggatagggagtggtgtgttttttttttgtcgtagaggtttttgggttttttgtataagagagtagtttggattttttaagtgtaggaggttatttggggtttttttagggtattgtttttttttcgggattagtttttgtttttttaattcggttttgttttttagttaatttttgtgtaattattgtattaggttagtttcgtttggttttgtagttttttgatttgaggttttattgttgatgaaagttaagttttatatattggaaggtaagggagggttttttagggaggatagttttgtagagaaatatttcgggtaatattgtatttttagtttttagggattagtagttgttattttgtttttgttttttttttataagagagattggggggagtttatttatttatttttaataaatatttaatgaggatttattgtgtgttatatagtttggggtttagggtatatttttgagtaagaggaaaaaattattttagtgggaggtttatagtaaataaaatataagtgttacggagaaagttaaagtagagaaaggaatggagaatgtttaggatggaggttagagtgttatattaggtggttaggaattattttaggtaatttttttatttaaaattttttagtgatttttatgatatgaaataggaagttattggagggtttgagtagaggaatgatttgttttaaaaggtttatttaggttgttgtatggtgaatagagttgcggaggggtggtaagagaagaaatgggaagattttttgtagttagaaagtttttgtagtaatttagagatggtagtgaattgatttagattggaaataatggaattagaagtgtttagatttttttaagtaaaggttttaaaaatttatttttaaagaatgagttaagggtcgggtatggtggtttatatttgtaattttagtattttgggagattagaggtgggtggattatttgaggttaggagtttaagattagtttggttaatatggtgaaattttatttttattaaaaatataaaaattagtcgggtatggtagtgtatgtttgtaattttagttatttcggaggttgaagtaggagaatcgtttgaatttagtaggcggaggttgtagtgagtcgattgcgttattgttttttagtttgggtaaaaagagtgagattcgttttagaaaaaaaggaatgagttaaaatttgttagtattttggattgtagggtgtgagagaagaggaatgaaggatgatattaaggtttttagtttaagtaattagagttgttatttgagatggggatgattttggaaggggaaaattagtaagagtttgtttttgtatatagttttaggtgtttattagatattgaaaaagaaatggtaagtaggtagtagatagtagagtttgaagttttggaagaggtttagattggaaatgtatatttggaggatgttagttttgtgggaatggagttaggaaaatgttatgatttgtttttttttttgtagtttagtttttattttggtagatttgaggtttgttttggatttagagaaagttgagttggttaggattttattattatgtaattaggattataaatgttagtaattaaaaataaagaaagttaggtttttttttgtttttcgaaatggttatagggattaagtatgtatattttataagattagaagtaaggaaggattagtaggaggttggaggtaaaagaaaaataagggtttagtacggtagtttatgtttataattttagtattttgggaagcgatggattataaggttaagagatggagattattttggttaatatagtgaaattttatttttgttaaaaatataaaaattagttgggcgtggtggtacgcgtttgtagttttagttattcgggaggtcgaggtagaagaattatttgaatcgaggaggtagaggttgtagtgagtcgagatcgtattattgtattttagtttggtaatagagtaagatttggttttaaaaaaaaaaaaagaaagaaaaaaagaaaaagaaaagtaagttgttttttttttttttaaaaatggttgatatttttttttgttgtttatagtgtttaagaaggaagtgtatttttatatattattatatttgaaagtaggtaaatttaatttatttttttttaaaaattttaaacggtaggatagtaaatattttagatgttaaaagttttatagtttttagcgtgattttttatttttgttattgtagtattaaagtagttataaataatatgtaaataaatagatgtggttgtattttagtataattttatttataaaaataggtattagattagtttgttaatttgtggtatagattgtttgttatatggagtttgttttagttattttttattattttgtagatgtgtttttttagattgatttaattgtagagatggtagttgagttattgtttttttttttcgggatattgtttagttgggagttggaagtttggtatgaggatttgtaagaggttttgtttttagatgaaaatgggggtatttatgttttattttttggaaatgaagaggtaagaatgttagttttaaagttaaagggggatgttatttttttttttttaattaatatttatgttttttttttttatttttttgaagg

SEQ ID NO: 18 - DNA, 5227 bp, Artificial Sequence
  chemically treated genomic DNA (Homo sapiens)
tttttaaggaaatgaggaaagggaatatagatattagttgagaagggaaaggtaatatttttttttagttttagggttaatatttttatttttttatttttaggaggtgaaatataggtatttttatttttatttgaagataggattttttgtaggtttttatattaggtttttagtttttagttggatagtgtttcgaaggagaaaggtaatgatttagttgttatttttgtagttggattagtttggaaaagtatatttgtaggataatggggagtggttggaataagttttatgtagtaaatagtttatgttataagttggtaagttggtttgatgtttgtttttgtaggtaaagttgtattggaatatagttatatttgtttatttatatattgtttatggttgttttggtgttatagtggtagagatgaagagttacgttagagattataggatttttaatatttaaaatatttattgttttgtcgtttaaaatttttggaaaagggtaggttaagtttatttgtttttaggtgtggtgatgtatgaagatatattttttttttgaatattgtgggtaataaagagaaatgttagttatttttggaagggggagaggtaatttatttttttttttttttttttttttttttttttttttttgagattaagttttgttttgttgttaggttgaagtgtagtggtgcgatttcggtttattgtaatttttgttttttcggtttaagtgatttttttgtttcggtttttcgagtagttgggattataggcgcgtgttattacgtttagttaatttttgtgtttttagtagagatagggttttattatgttggttaggatggtttttattttttaattttgtgatttatcgttttttaaagtgttgggattataggtatgagttatcgtgttgggtttttattttttttttatttttagttttttattggtttttttttatttttggttttgtggggtatgtatatttggtttttgtagttatttcgaagggtagaagagggtttgattttttttatttttagttgttgatatttgtagttttggttatataatagtaaagttttggttaatttagttttttttaaatttaaagtaggttttaaatttgttagggtaaaaattaaattatagggaagggaataaattatagtatttttttaattttatttttatagggttgatattttttaaatgtatatttttagtttggattttttttagaattttagattttgttgtttattgtttatttgttattttttttttaatgtttaataggtatttaagattatgtgtaaaggtaaatttttgttgattttttttttttaaggttatttttattttagatgataattttagttgtttaagttaaaaattttggtattattttttatttttttttttttatattttgtaatttaaagtattagtaaattttaatttatttttttttttttgagacgggttttattttttttgtttaggttggaaggtagtggcgtaatcggtttattgtaattttcgtttgttgggtttaagcgatttttttgttttagttttcggagtagttgggattataggtatgtattgttatgttcggttaatttttgtatttttagtaaagatgggattttattatgttggttaggttggttttgaatttttgattttaggtgatttatttatttttggttttttaaagtgttgggattataggtgtgagttattatgttcggtttttaatttattttttaaaaatgagtttttaaaatttttgtttagaagaatttaaatatttttaattttattgtttttaatttagattaatttattattatttttaaattattgtagaaattttttgattgtagaaggtttttttatttttttttttgttattttttcgtaattttatttattatatagtagtttgagtgagttttttaaaataggttatttttttgtttaaattttttaatgattttttattttatgttatggaagttattgaagggttttgagtggaggaattatttaaggtaatttttgattatttgatgtaatattttgatttttattttgaatattttttatttttttttttgttttagtttttttcgtggtatttatattttgtttattgtaggttttttattgagatgattttttttttttgtttaaggatgtattttgagttttaaattgtgtggtatatagtaggtttttattaagtatttgttaagaatgaatggataaattttttttagttttttttatagggaaggggtagaagtagagtggtagttgttgatttttaggggttagagatgtaatattgttcgaagtatttttttgtagggttgttttttttggggaatttttttttgttttttagtgtgtgggatttggtttttattagtagtagagttttaggttagaaggttgtagagttaaacggggttggtttgatgtaatggttatatagagattagttgggagataggatcgggttaaagaggtagggattaatttcgagggaaggataatattttggggagattttaaatggttttttatatttaagagatttaggttgtttttttgtgtaggaggtttagagatttttacggtaaaaggaaaatatattattttttgtttatcggtattttttttaaaggtttgtgtttttttaaggtttttttattcgttgtagggtttagtagttttagttattaaggtggttatgttgatattagaggtattgagattgagatagaattgggggtggggtagggagaaggttcgttggtggcgaagcggcggaaacggtttgagcgatggttatttagttttagagcgggggtgtgttttgttgatttgttttttcgcggataggtttaacgatgaggtttgaagttggttacgggaaagaatgaattttttaagggtaatcgaggtttttttgtttagtagtatagagtagggttcgtgtttcggtttcgggtaggggtggagagacgtcgtcgttcgaagtaataggggtttgtaagtattattttagaataagggattttttttatttttttttcggacggtttttaattttattgtggaggagtgaggtcgattttaaagagcggacgttttaattttgaggagacgggagggtaaaaggtagatgggaattagtattcgtttttttttttaggttttagttttgattttggttttgtcgttgttattcgtttatttttaatatgatacgtttagtgttttagatttaagtttttgatttcgggagcgtttggttgtaattttttattatggttttgttttttttttaggggcgggattttaaaatttattaattagaaagtggtacgtcggtattggtttcgtttcgtttttcgtattcgttatttaggagtttcgcggtatcgttttcgtcgttttttttcgttagggggtcgacgtagtgtcggattcggaagtggttttgggttacgaggttttacggaggaggtgggtgagttatgcgcgcgcgcggaggggagtgtagcggggggggaggggaggaaaggggggcggggatgatgtaatgtttggtaatcggtgtttgtacgcgtacgcgtaggggatatcgagggtggtgggaggtgcggagggtgggggagaggagagagggcggggcgttagttttcggcgtttaacggttttaacggttattagttttggtcgtttttagtcggtcgtgagtttttttgtcgtttgttttttttagaagttgttgtttcgtttatttagttttattcgtcgttttatttttattataagggatttttatattttttggttttttttagttaatgggtatataggttttttgaatttttttttttaaagttggtatttatttattgggattgtcgatatttcgagtttttttaaagaggttttttggtcgggtttagtggtttacgtttgtaattttagtattttgggaggttgaggagagcggattatttgaggttaggagttcgagattagtttgattaatatggtgaaatttcgtttttattaaaaatataaaaattagtcgggtgtggtgatgcgcgtttgtaattttagttattttggaggtagaggtagaagaatcgtttgaattttggaggcggatgttgtagtgatcgagatcgcgttattgtattttagtttgggtgatagagcgagattacgttttattaaaaataaaaaataaaataaataaataaaaaaacgggggtggttttttgttttagtttcgtaaattttttaaaaggggtcgaggtattggaattttttggtagttatttttcgttttttttagaatagcgtttttgatttttattttgtagttggtaagtttttagtttgttagaagttatgtattttgtttagtggattcgattttgtttggttatttatttttttttacggtatttttatggttttttttaagatttttttttgttgtattagatagtaagttttgtgattttttgtgtgaggagcgcggtataggtttgttttttaggtgttcgggtcgagatttatagcggagttttatttcgggacgtgtgagtgtattttagcgtaggattgttttggattggggagatcggagtcgcgattttagatttaattttttattatttgttaagggattttatcgtttttgtttgtaaattaaagataaaagttgtgaaggtaaaatgagaattatgaatttggaggtaatttgattaaaagtaaaacgtattatttagaatgtaaagtattttttttgtgttttgaaaatagaggttatgtggtggtttgttatatattttgttatatttttatgggggtagttagagtttaagtagaaattgttataaggtcggttgtgattggagtggtgtggtaatgataggtttttggttaggttgtttcgttgttttatatttttattttttttttgaaaatgggggtagtgtggagggtggattagatggttttttttggtttaaagatagattaggttgttagtgataggtagaggttatgtgatttgataggttgaggtcgtgttgtgatatgttgatttggggaggcgggttaagttttagtatattattcgggaagtttttggggcggggtagggtaa

SEQ ID NO: 19 - DNA, 6192 bp, Artificial Sequence
  chemically treated genomic DNA (Homo sapiens)
gttttaatcggagaaatgggaaattggattgattaagatttgaaaatgaaataggtaattgttgaagagtattggtttatttaaaaagcgtgtatttgttttttgttagatagttatagagtttgttatgaaaagtttaagttttggttaggtattgtagtttacgtttgtaattttagtattttgggaggttgaggtgggcggattatgaggttaggagattaagattattttggttaatacggtgaaattttatttttattaaaaatataaaaaattagttgggtatggtggcgggcgtttgtagttttagttattagggaggttgaggtaggagaatggcgtgaatttaggaggcggaggttgtagtgagtagagatcgcgttattgtattttagtttgggtgatatagcgagattttgttttaaaaaaaaaaaaagaaaagtttaagttttttttttaggttgttagtatgttttgtggtaattttatttttattagttttggaaaggagggtaaaggagaagtagagttgaaaattaaataagtgatggttatgtttttttaaaggattttagatttttttttattaaatatatatatagagagggtaaatttgtaaaattaaaagaatttttgggtataatagtggttttaagtggtaagatttttagtattgtttatagtattggtaaattaaatgttttataagaattaggaatagagtcgggtacggtggtttacgtatataattttagtattttgggaggttgaggcgggtagattatttgaagttaggagtttaagattagtttggttaatatggtgaaatttatcgttattaaaattataaaaattagttaggtgtggtggtaggtattcgtagttttagttatttgggaggttgaggtaggagaattgttcgaattcgggaggtagtgagtcgagattgcgttaatgtattttagtatgggcgatagagagagatttcgttttaagaaagaaaaaagaattaggaattgaggatattttttaattttagtttgtgggtatttttaatataaaataatttagagaaatttagattttaagatgttttagtattttagtaaattaaatgtggtaaggtaagaaaggagaggtttttttttcgagatatttgttaaattttagaatatttgatagtgagaaggttagaattagtttttgttattttttatgttttataattaagatattttttttttgaattatttatattgttaatagaaattggtatgggggaatatattaatttttttaagtttaatttttgtaatagacgtgtagaataagatagtaagaaatattaagcggtggttttttgtttttgaaggaagtgaaatattagtaagttgttgaaaatttttagaggtgttttaaggagatgggagaggaggaatgaggttttaagttgaaattattttttttttttttattttaattttaattaaatttaaaaatgtatggatgattagtggagttatataggtttaatataggtttaatagagtatacgatttggggtatgttataaatttttagtatttatttttgtgaaatggaggttagtagtttgtattttataaaggttgtagtgaatattaaacgagataatagatgtaatttgtgtttaatatgatattatataggtagttaaatgtaagatgttttttagtttttttttttttattttattttattttatttttggattataaattttttcggagattttattatttattgtttttcggtcgtagaggtataggcgttaacgttggtttttatggtttttttattggagtgggatttgtttgaatttgtaggtgaaaagttagagcggagttttcggttaataaaattaaatttagggaagcgaggatgggtttttagttaaaagtttggtggcgtttgttagttatagtgcgttttttttttattaacgtattgagagggttcgattagattatttttgattatttaatttgacgagagaagcgtaaaggtgattatagatgaagaggttggtagtcgttttaggaggttgaggtcgtgagggagtgggaattttaatggaaataggttttttttcggaggggatagtcgggaacgatcgatttatttttttttttttaagttttcgtagtttaaggttggggattttttaagggtttcgttattttttttaataagtttaagtgggattagaggtgttggtaggcgggaagtggggattcgggggtatagttaaatattagagttcgggtttcggaatgtggttaaagaggggttatcggggggaggggtcgggtggggaggatttggggaggggcggggtttaggagggggtaagaggtcggggtttttagtttcggagattcggggtttttattcggtttttagtcgtatgttgagcgttttttttagtcggggttttcgtcgtatagcggggtagttttattttttttatttggttcggttgttttgtttgtttcgaggacgttatttttttgaggtttgattaattaatcgtcgttgggcgaggttttttttaggcgttttcgttttcgttttttcgtttagattaaggtagtcggaatagagtttgtcgatgtaggggattggggtagaggggtggagttcgggtgttcgggttattttgtatagttttcgttaagattttgttttttaggaagattttaagtttatattttttttgcgttgttatatgtgtattattttggttttgttttttttttttgagacggagtttcgtatttgttgtttaggttggagtgtaatggcgcgatatcggtttatcgtaattttagtttttcggttttaagtgatttttttgttttagtttttcgagtagttgggattgtaggtatgcgttattatgttcggttaatattgtatttttagtagagatggagtttttttatgttggttaggttgttttcgaattttcgattttaggtgatttgttcgtttcggttttttaaagtgttgggattatagaagtgagttatagcgttcggtttatattatttttattgagttaatttttgtttatttttatagtgttatgggtatatttagggatttgttaatggatgaatgcgaagaaatttggaaattaatttttagatattagtttagttttatttattgagtgtttattatatgttagggattttggtaggttttgaaataaaaatatttaagatttaatttttatttttacgtttaggttaaatatatttataattatagtattatggggataggattcggataagtgtgtaggtttattgggagaatataaaagggggtattttgaagagaagaggtttttataaaacgttattattttatattggttgaattgttagatttttttaattgttagattttaaattaaatattggacgggagtagtggtttatatttgtaattttaatattttaggaggttaaggtaggaggattttttgagtttaggaggttgaggttgtagtgaattatgattatgttattgtattttagtttgggcgatagagcgagattttgtttaaaaataagataagaaaataaaaaatgaaattatatgaaaaaggatatatatattagagttaatcgttagtttttattatagttgtgttttgattaatatagattgtttaaaagggatgatttaatgaataattttttttattaaacgttgttttaaatgtttaaattttttttgagataatatttaatttttttttttacgttttttttgtttgtttttgtttttgtttttgtttttgtttgagacgaagttttgtttttgacgtttaggttggagtgtaatggtgcgatttgggtcgattgtaattttcgtttttcgggtttaagcgatttatttgttttagttttttaagagttgggattataggcgtgcgttattacgttcggttaatttttgtatttttagtagagatagggttttattatgttggttaggttggttttaaattattgattttagattatttgttcgtttcggttttttaaagtgttgagattataggggtgagttatcgttttcggggtttttgtttacgtttttataaataaaatatgaggtgggaggattgtttgagtttaggagattaaaattgtagtgagttattatcgcgttattgtattttagtttgggagatagagcgaaacgttgttttaaaaaaagaaaaaagaaataaggaaggaaagtgtttttcgaatgaataaatatgagtagataattatttttagtttatataaaatgtttttttttaagagaggaattttttgattatttttattattatttttttaattttagatgtttattttttaggaggaaaaaaataaatttttttatagtagtagtattaaaataaagatgaatatgttgttaagaggtatttgaataatttttaatagtgtcgagtcgtattttttttttttttttcgatgtatttgagattttaatgtttattatatttatttaagcgttttgttttgagattttaaattaatttgtatagttgaagtaggaaatagaatgggtggaaatatgcgggtgtttgtattagtattatgtattttatatgcgaataggaatgttttaaaaatttaatatagtatatatgcgtgtgtatcgttatgtaaaataagtttttattggttttatatttgaacgcgcgaatgtagtttttaaaagttaaaaataatttttaggttgaatcgcgcgatagaacgaaagcggttttaaatttagagattatagttttcggtatgtttcgacgttatacgtgattagcggtaattagaattatatttttcggcgtgttttggttttacgtgtgatttgttgcggaacgaattatatttttcggtaggttgcggaagggggtcgagtagaaggatcgtcgtttcggtttttcgcgatttttcgaaggtgggtaggttttattttgtggaggatggaggtgatcggggacgtcggggtattagaatttggcgagattcggattttaaagtcgtgtttgttgcgtcgtaattatagtcgcgaatagtacggcgtggtcgttttttgtttcgaagatttgaggagtaagggttggttcgggatttcgggcgagggtgtgggggagttagggtcgggtgaggacgttcggcgggggcgaggcggggttaggagaggcgatttggggatttttgtatttcgggtggaggtttgggatagaaacggttcgagtgggtatagcgatttatagatttaaggcgtttgagcgtaattaatttcgtgtgagattttacggtggtgggaagatagttaggaagtaatgtgtaaattaagttagattcggtttaggttttttgtttgaaattatttcgatgttggattaaacggattttattgggtttttgttatttcgttatatttagatggtataagaatttttagttgagtttacggcggtgtggggaggggtttttatcgttcgttttggtaggaatttatgtaggaaagagggagttgttattgattatttttggaggtttagataaggaacgtgagttgtaagtgacggagtcgacggaagtttcgagttcggttttatatttttattagttgtttggttttgtatttaattagtttttaatttttagtttttttattagtaaattgggtataatatttatagttttgttttaaagggttgttggtttttttaaataagatgatatatttaagtgatttataagttttattagttagtagtaataaatcgtttatttaaagaagttttataggttatatgtgtgagttagttttaggtatgtagttatagtgtgtgttagagggtatagttgtttttttttagttattaatagaaattatatggaaatttttagagatttatgaatagttaaagtattataaatgttttggtaatatggattttgtatataagtatttatgtatttttttttttgatattagattattttatttttaatttttttttagtgtcgtggttggatgtgcgtggtatagaggttggtgttttttgtagtttagcgtatatatgttttgttgttttattgggtggta

SEQ ID NO: 20 - DNA, 6192 bp, Artificial Sequence
  chemically treated genomic DNA (Homo sapiens)
tattatttaatagaatagtaaggtatgtatgcgttggattgtagagaatattagtttttgtgttacgtatatttagttacggtattgaaggggaattagaagtaaagtaatttaatgttaggaaaaaaaatatataaatgtttatatgtaaaatttatgttattaaagtatttataatgttttggttgtttatgggtttttgaaaatttttatatgatttttgttggtgattgagaggaagtaattgtgttttttgatatatattgtgattatatgtttggggttggtttatatatgtaatttgtaaaatttttttgggtaagcgatttgttgttattggttaataagatttgtaagttatttaaatatattattttatttgagagaattaataattttttgaagtagggttataaatattatatttaatttgttgatgagaaaattgagggttgagagttggttaagtgtaaggttaagtagttggtaaaggtatggggtcgggttcggaattttcgtcggtttcgttatttataatttacgttttttgtttggatttttagaaatggttagtagtagtttttttttttttgtataggtttttgttagagcggacggtggaaatttttttttatatcgtcgtgggtttagttgggggtttttgtattatttgagtgtggcggagtggtaggaatttagtggggttcgtttggtttaatatcgaagtgattttaggtaagagatttaagtcgagtttggtttaatttgtatattgttttttggttgtttttttattatcgtggagttttatacgagattaattacgtttaagcgttttaaatttgtaaatcgttatgtttattcggatcgtttttgttttaagtttttattcgagatataagaatttttaagtcgttttttttgatttcgtttcgttttcgtcggacgtttttattcggttttggtttttttatattttcgttcggggtttcgagttaatttttgttttttaggttttcgaggtaggaggcggttacgtcgtgttgttcgcggttgtagttgcggcgtagtagatacggttttagagttcggatttcgttagattttggtatttcggcgttttcggttatttttattttttataaggtgggatttgtttattttcgagaagtcgcgggaggtcggagcggcggtttttttattcgattttttttcgtagtttgtcgggagatgtagttcgtttcgtagtaaattatacgtgagattagggtacgtcgggaaatgtagttttagttgtcgttaattacgtgtggcgtcgaagtatgtcggaaattgtagtttttgggtttaaagtcgttttcgttttatcgcgcgatttagtttaggagttgtttttaatttttaggagttgtattcgcgcgtttaaatataaggttaatagagatttattttgtatgacgatgtatacgtatgtatattgtattgaatttttagagtatttttattcgtatatgagatgtataatgttaatatagatattcgtatgtttttatttattttattttttgttttaattgtgtaaattagtttggggttttagaataaaacgtttaaataaatatagtaagtattaaagttttaaatgtatcggagaggaaaggggaaatgcgattcggtattgttggagattgtttagatgttttttgataatatatttatttttgttttaatattgttattatggaaaagtttgtttttttttttttgaaaaataaatatttaagattaaaagaatagtaataaaaatgattaaaaagttttttttttaaaagagggtattttatgtaaattagaagtaattatttgtttatatttatttattcgggggatattttttttttttgttttttttttttttttttgagatagcgtttcgttttgttttttaggttggagtgtagtggcgcgatgatggtttattgtagttttgattttttgggtttaagtaatttttttattttatattttgtttataaaaacgtgggtaagggtttcgggggcggtggtttatttttgtaattttagtattttaggaggtcgaggcggatagatgatttgaggttagtagtttgagattagtttggttagtatggtgaaattttatttttattaaaaatataaaaattagtcgggcgtgatggcgtacgtttgtagttttagtttttgggaggttgaggtaggtgaatcgtttgaattcgggaggcggaggttgtagtcggtttagatcgtattattgtattttagtttgggcgttaggagtaagatttcgttttaagtaaaaataaaaataaaagtaaaaataaataaaaaaaacgtgggagaggaaattggatattattttaagaaaagtttagatatttaaaatagcgtttagtaggaggaattatttattaagttattttttttaagtagtttatattgattaaaatataattataataggagttggcggttaattttaatgtatgtatttttttttatataattttattttttatttttttattttatttttagataaggtttcgttttgtcgtttaggttggagtgtagtggtataattatagtttattgtagttttaattttttgggtttaagggatttttttgttttggttttttaaagtgttgggattataggtgtgagttattgttttcgtttaatatttaatttaaaatttaataattaaaaaaatttaataatttaattagtgtaaaataatgacgttttgtagaagttttttttttttaaaatgtttttttttatgtttttttaatagatttgtatatttattcgagttttatttttataatattgtaattgtaagtgtgtttggtttgggcgtgggagtagggattgagttttgaatgtttttattttaaggtttattaaagtttttagtatatagtaggtatttaatgaatggaattgaattgatgtttaaaaattaatttttaagttttttcgtatttatttattggtaagtttttaaatgtgtttatggtattgtggggatgggtagagattaatttaataagaataatatgggtcgggcgttgtggtttatttttgtaattttaatattttgggaggtcgaggcgggtagattatttgaggtcgggagttcgagagtagtttgattaatatggagaaattttatttttattaaaaatataatgttagtcgggtatggtggcgtatgtttgtaattttagttattcgggaggttgaggtaggagaattatttgaaatcgggaggttgaggttgcggtgagtcgatatcgcgttattgtattttagtttaggtaataagtgcgaaatttcgttttaaaaaaaaaaagtaaaattagaataatatatatataataacgtaaagaagatatagatttgggatttttttggaaagtagagttttaacggaaattatgtaaggtgattcggatattcgggttttatttttttgttttagttttttatatcgataggttttgtttcggttattttagtttgggcgggagggcgagagcgagggcgtttgggagaaatttcgtttagcggcggttgattagttaggttttagaaagatggcgttttcggagtaggtagagtagtcgagttaggtaaggggagtgggattgtttcgttgtgcggcggagatttcggttggagggggcgtttagtatacggttgggagtcgggtagggatttcgagttttcgaagttggggatttcgattttttgtttttttttgagtttcgtttttttttaggttttttttattcggttttttttttcggtgatttttttttgattatatttcggagttcgggttttggtgtttggttgtgttttcgggtttttatttttcgtttgttagtatttttggttttatttgagtttgttggggagggtgacgggatttttgggaagtttttagttttgagttgcgagggtttgagaaggagaggatagatcgatcgttttcggttgtttttttcggggaggggtttgtttttattagggtttttatttttttacggttttagttttttggagcggttgttagtttttttatttgtggttatttttgcgtttttttcgttaagttggatagttagaaataatttagtcgagtttttttagtgcgttgataggaaagggacgtattgtgattaatagacgttattaagtttttggttgaggatttattttcgtttttttgggtttggttttgttggtcgagggtttcgttttagttttttatttgtagatttagataaattttattttaataaggggattataaggattagcgttgacgtttgtgtttttgcggtcgggaggtagtggatgataaggttttcgaaggggtttatagtttaaaggtggggtagggtggggtgaggagaaaagggttaagagatattttatatttaattgtttgtgtggtgttatgttgagtataaattatatttattatttcgtttagtgtttattataatttttatgaagtgtaggttattaatttttattttatagaaatgaatattaagggtttgtgatatgttttaaatcgtgtgttttgttgagtttgtattgaatttgtgtgattttattagttatttatatatttttgagtttagttaggattagaatgaggaagaagaaaatagttttaatttggggttttatttttttttttttatttttttgaagtatttttaagagtttttagtaatttattagtattttattttttttagaggtagaagattatcgtttagtgttttttattgttttattttgtacgtttgttataagaattgaatttaaaggagttggtgtgtttttttatattagtttttattagtagtgtgaatgatttaggaagaagatgttttgattgtaaaatatgggagataataaggattgattttggtttttttattgttaggtgttttggagtttggtaagtgtttcgagaggagggtttttttttttttgttttattatatttagtttgttgaaatattaaggtattttggggtttgggtttttttgaattgttttgtgttaggaatgtttataggttgggattgaagggtgtttttagtttttgattttttttttttttttaagacggagtttttttttgtcgtttatgttggagtgtattggcgtaatttcggtttattgtttttcgggttcgagtaatttttttgttttagttttttaagtagttgggattacgggtgtttgttattatatttgattaatttttgtaattttagtagcgataggttttattatgttggttaggttggttttaaatttttgattttaagtgatttgttcgttttagttttttaaagtgttgagattatatgcgtgagttatcgtgttcggttttgtttttgatttttataggatatttaatttgttagtgttgtaaatagtattaaaaattttgttatttggagttattgttatgtttaaggatttttttggttttgtaagtttgttttttttgtatatgtatttaatagaaaaggatttaaggttttttaagggggtatggttattatttgtttgatttttagttttgttttttttttgtttttttttttaaagttggtggaggtaggattgttatagaatatgttggtagtttgggggaaaaatttgaatttttttttttttttttttgagatagagtttcgttgtgttatttaggttggagtgtagtggcgcgatttttgtttattgtaattttcgttttttgggtttacgttatttttttgttttagtttttttagtagttgggattataggcgttcgttattatgtttagttaattttttgtgtttttagtagagatggggttttatcgtgttagttaggatggttttgattttttgattttatgattcgtttattttagttttttaaagtgttgggattataggcgtgagttgtagtgtttggttaaaatttgaattttttataatagattttatggttatttaataagaagtaaatgtacgttttttgaatgaattaatgttttttagtaattgtttgttttatttttaagttttgattaatttagttttttattttttcgattaaagt

SEQ ID NO: 21 - DNA, 18060 bp, Artificial Sequence
  chemically treated genomic DNA (Homo sapiens)
ataaaaaattagttgggtttggtggcgggtatttgtaattttagttatttaggagattgaggtaggagaattgcgtgaattcgggaggcggagtttgtagttagtcgagatcgtattattgtattttaatttgggttatagagcgagatttagttttaaaaataaaaaataaataataaaaataaaaagttttaggtatagtggtttatgtttgtaattgtttgagtttaagagtttaagattagtttgggtaatatagtaagattttgtttttattaaaaaaaaaaaattgaaaaagaaaaagttatttaaagagtttggtagattacgtaagtgttgatttaatattaatcgttgggaattttagttttattatttagtttttttgggttttgttaagtgtgagtaatttatagtaaatggagggtttgtgtgaaggtttatttttggttaggatgatttttttttattagttgttgggggaattgtgtgtgtatgtatatgtatatgtatataaatatatttatttgtgaattttataatataaatattttgtaatataaaaatgtaaaagtatgttttaattttaaatttttttttggtgttttttgtggttgaaggtaaagtattttttagggttaggtgtcgtggtttatgtttgtaattttagttttttgggaggtcgaggtgggcggattatttgaggttaggagtttaagataagtttggttaatatggtaaaatattgtttttgttaaaaatataaaaattagttgggcgtagtggcgcgtgtttgtaattttagttattcgggaggttgagggaggagaattgttggaatttaggaggtagaggttatagtgaatcgagatcgtgttattgtattttagtttgggtaatagagtgagattttgttaaaaaaaaaaaaaaaagaaaaaaaaaaagaaaaaaatttagttttatttattaatagtattttatttattattttattaattttttagtgtatagtttagtatatatatattgttgtgtaatagatttttggaattattttgtaaaattgaaatttttgaataataatttttttttttttttttttttcggttttggtaattattattttattttttgtttttaagattttgattattttagatattttataagtggaattgtatggtatttgtttttgtgtgattaggtttttttattgtgcgtaatgtttttaaggtttatttatgttgtagtatataataagatattttttttttttttttgttttttggagacggagttttatttttgttatttaggttggagtgtaatggtgtgattttagtttattgtaatttttatttttcgggtttaagtagtatttttgttttaattttttaagtagttgggattataggtgtatgttattatatttagttaattttgtatttttatttttatattatttatttatttatttatttatttattttgagatggagttttttttttgttgtttaggttggagtataatggtgtaattttagtttattttaatttttatttttagggtttaagtaatttttttgttttagttttcggagtagttggggttataggtatgagttattatgtttagttaattttgtatttttagtagagatggggtttttttatgttggttaggttggtttcgaatttttgattttaggtgatttattcgttttggttttttaaagtgttgggattataggtgtgagttattgtatttggttatttttttttttttaaagattgaattaggttgggtgtagtggtttatatttgtaattttagcgttttgggaggttaaggttagtagatcgtttgagtttaggagtttgagattagtttgggtaatatggagaaattttgtttttataaaaaatataaaaagttagtttattgtggtggtatatatttgtagttttagttatttaagaagttgaggtaggagtatgttttgagtttaggagtttgatatttgtttgggtaatatagtaagattttattttttagtagtaatatgattttttttttttttttttttgttttttggttgttgtgattaatgttgtaatgaagacgggtatgtaaatatttttttaagattttttttttaatttttttgaatttatatttagaaatgggattgttggattatatgataattttatttttaatttttttgaggaatttttatgttgttttttatagtagttttattattttattcgatttttaatcgtgtataagggttttagtttttttatatttttattaatatttattatttgatagtggttattttaaggggttttagggatattttattgtggttttgatttgtatttttttgatgattagtgatgttgagtatttttttatatgtttgttttttatttgtatattttttttgggaaagtatgtatttaaattatttgttttttttgtttgtttttgagacggagtttcgttttgttgtttaggttggatggagtgtagtggtgtaatttcggtttgttgtaagttttattttttgggtttatattatttttttgttttagttttttgattagttgagattataggcgattgttattacgtttggttaattttttgtatttttagtagagatggggttttattacgttagttaggatggtttcgattttttgatcgcgtgattcgtttgtcgtttgggttttttaaagtgttgggattataggtgtgagttatcgtatttagtttatttgtttatttgtaaatcgagtttttgttgttgtattgtagaaatttattattttttaaatttttatttgagatagagttttttttttgttgcgtaggttggagcgtaatggtgtaatttcggtttattgtaattttcgtattttaggtttaagtgatttttttgttttagtttttcgagtagttgggattataggtatattattatgtttagtaaatttttatattttgaggagagatagggttttattatgttggttaggttggttttaaatttttgattttaggtgatttattcgttttggttttttaaagtgttgggattataggcgtgagttattaagtttgacgggtagtaatttattttttatataattttttttttttttttttggtagagacgaggttttgttatgttgtttaggttggtttaaaattatcgggtttaagtgatttgtttattcgggttttttaaagtgtagggattataagtatgaattattatgtttggttgtaattttttatatatttcggatattaattttttattagataatatagtttgtaaattttttttttttttattttgtaggttgtttttttattgttggttattttttttgttgtatagttatttttaagtttgttgtaaatttatttgtttattttttgttttgttgtttgtgttttgttgttatatttaagaaattattgttaaatttattgttatgaagtttttttttatgtttttttttaggagtattatagttttaggttttatgtttaatttttaataagttttgtgtttttgtatatggtgtaaggtaagggtttaattttatttttttgtatgtggttatatagtttttttagtattatttgttaaagatataattttttttttatgttttggtgttttaaaaaaaaaaaaaattttggttggttacggtggtttaggtttataattttagtattttgggaggttgaggtaagtggattgtttgaggttaggagttttagattagtttggttaatatggtgaaattttgtttttattatcgaagatataaaaattagttaggcgtggtggagtacgtttgtaattttagtttattagggaggttgaggtatgagaatcgtttgaatttgggaggtagaggttgtagtgagttaagattttattattgtacgttagtcggggtgatagagtgaggtagggttttattttgtcgtttaggtaggagtttagtggtttaattatggtttattgtagtttatattgttagggtttaagttatttttttattttagttttttaagtagttaggattataggtgtgtgttattatgtttagtaaatttttgtattttttgtagagatggggtatttttatgttgtttaggttggttttgaatttttaattttaagcgatttttttatttgggttttttaaagtattgggattataggcgtgagttattgcgtttgatatggtgttttttaatttatttttattttttatttttatttttttgagataaggttttgttttgttttttaggttggaatgtagtggtataattatggtttattgtaatttttgttttttcggtttaagtgatttttttgttttaatttttggagtagtttggattatgggtatatgttataacgattagttaatttttgtttttttttttttttttttttttttttttttttttttttttttttgagatgtagtttttttatgttatttaggttggtttaaaatttttgggtttaagcgatttttttattttggttttttaaagtgttgggatgataggcgtgagttacgtggtgtttaaaaaaggtaataaaaaattttttatatattgggtatagaagtggtatgggtttttatatattgtgagatttttggtattagttataaattttgtgtatatttaagattttttagagtaggtgtaattatttcgttttatagatgaggatatagaggttgagtcgtagtgatttatttaaggtcgtatagttagtaaatagatggaggttggattggaattgaggattttatttaagggtttttataaatttttgggggtttttcgttgttttatttttattatatttgaaagaatgaatgaatgaatgtttcgggtatcgtgtttattttttagtaaatcgtggagtttggacgagtttattgtttcgcgtggggggggtgtgtgttcgttttgcgtatgcgtgttttttgggtatggtcggtttcgttttatttttttgtatagggtatcgttttttttcgtttggtatattttttttttttttacgttcggattggggtggtagacgtcgttttcgtttatcgtttttttttatcggttttcgcgcgaaaagtcggggcgtttgcgttgtcgtcgtcgcgtttgttgaagttttcgagatgtcggcgcgtatcgttttagttcgggtgtttatattggtcgtttcggttatttcgttgttcgacgatgttcgtaggcggtaggtattatgggggggaatacggatttagggggataggtagggcgttgggtggggggtcgttttttttcggggtggtcggtggtcgttgttgatagacgggcgcgtatgcgtggggtggtgcggcgcgtagcggtagttggcgcgggtagggtggtattttcggtcgcgcgtgttcgggttgtttggcgttaaaatggatcgtggattttttcgtagttttttggtggttagaaattaggcggggtgggggtttttttttgatttttaaatatagtaagttttgggttcgttttcggggtttttttttttaagtagcggtgggtcgggtttttgattttagtttggtcgtataggaagtgggtagttcgcggttaacggatatttttcgggtatcggtatttcggtttttattttcggtgttcggttcggttttcgggggcgtttttgtggtggggggttttttagtgttttttttttaaagttgtgtatttcgatggcggtttttagagacggatgttattcgtcggggtttgggttgggttggtttatgttcgagagtttagtttttcgtggggtatttattttgttagttgggattgtgtggtttttgttttttgggaaagtttatgttttggtaggaattttaatcgtgtattgtagcgtagggttcgggaagcgtgaaggttgtatggttggtttttttttgtaaatttgtgtttgtgagtcgtgggtattagggaagttttgttaatgagaattggttatattttcgtgtgtgtttgtgtgtgtttatgggtgtgttttttagtgtgtgtttaatgttggaggttttggttttagtagtttatgtttttgtttaattttcgtgtataaggattagtgggagtattggttttagttttttgtttatgaacgttattagtttatttttgaaaatttgtttaagtgaggtgtgcgtgagttagaggaatttttattaggcgtggatatttttagttggatttgtgaaagtattttttgttatttttttatttttttaggtttgttaattgatttggttgggttagttcggttttgatttgggtttttggggagggatggatatttggtttaattttcgtttttttttttttttttttttttttttttttgaaggttgggtgttgtggtttatgtttgtaattttagtaatttgggaggtagtggcggacgaattttttgagttaggagtttgagattagtttgggtaataaggtaaaattttatgtttattaaaaatataaaaattagtttggagtagtgtcgtgcgtttgtggttttaattatttaatagattaaggtgggagtattatttgagttttagaggttgaggttgtgtgtagcgagttgagatcgcgttattgtattttagtttgggtgatagagtgagattttgttttaaaaaaagaaatattttttatttttagagatgggttttattttgttgtttaggttggagtgttttggtataattataatttattgtagttttgaatttttgggtttaagggatttttagttttttgagtagttgggattataggcgtttattattatgtttagatgatttttttagtttttgtttttgtatacgtgaggttttattatattgtttaggttggttttaaatttttgtttttaagtagtttttttgtttttgtgttttaaaggttaggattataagtatgagttattatgttttaattattatttttttttgtttgtttgtttgagatggagttttatttttttatttaggttggaatgcggtggcgtgatttcggtttattgtaatttttatttttagggtttaagtgatttttttgttttagttttcgaagtagttgggattataggtgtatattattacgtttggttaatttttgtgtttttagtggagtcggggtttttttatgttggttaggttggtttcgaatttttgatttcgtgatttatttgttttagttttttaaagtgttgggattatagttaaattattttttaattagttagtgggtatatatttttttgaattatttgtgttagtatttttttaaaataaaatttgatttaaaatggaatggaagtgaaattatgaaagtgtttggttttatgatgttatatttaatttagagaagtttgggttcggttttttttttttattttttttttttattttgtagagatggggttttgttatgttgtttaggttggttttcgatttttggttttaagcgatttttttgttttagttttttaaagtgttgggattacgggtgtgagttattatgtttagtttgtttagtttttttgaaaatatgatttttattggtttaatgattttaaataagcgtatgttatttttatatttatagtttaggaataatgatatgggtttttagttggtattgggttaaatgagaatatgtatggtatataaaggtttatatgttagtggttaatttagtttgttttttttagtttttttttaagagataggattttattgtgttatttaggttggaatgtagtggtatagttatggtttattgtagttttgaatttttgagtttaagtaatttttttgttttagttttttgagtggttggtatatgttattatgtttaagttaatttttaaaaaattttttagaaggttgggcgcggtggtttacgtttgtaattttagtattttgggaggttgagatgggtagattatttgaggttaggagtttgagattagtttggttaacgtggcgaaattttatttttattaaaaatataaaaaaattagttaggtatggtggtaggtgtttgtaatcgtagttattcgggaggttgaggtaggataatcgtttgaatttaggagtcgagattgtatcgttgtattttagtttgggtaataggagcgaaattttgttttagaaaaaaaaaaaatttttttttttagagatgagggttttgttttgttgtttaggttggttttgaatttttggattgaagtaattttttgcgttggttttttaaagggttgagattataggcgtgagttatagggttcggttattattttttaagagtttttaaaagtggatgttgtaggagttaattgttaggaagtaggaatttttgttaaggtttgttgtttgttaaagtttttttttttaataggggttgttagtaggttattggtttaggggttttgttggttttgtgtaaatattttgtttggttgaattggaatattattaggtgagttttataatttattattgattttgggttttatatttttttatatttagattgttttattgtaggtattggagttttggaggattgtttttgattatgtggtagatattgaaattgtagtttatatgatttattttatagatttttttttttttttttatattttgaaaatattttattaaatgaaaaataaatatggtatttaatagtatttgaaatttagatttttttttttttttaattgaggtagggttttgttttgtggtttaggttagagtgtaatggtgtgattttagtttattgtagttttcgtttttcgggtttaagtaatttttttgttttagttttttaagtagttgggattataggtgtgtattattacgtttagttaatttttttttttttttttcgaggttgagttttgttttgtcgtttaggttggagtgtagtggtcgtgatttcggtttattgtaatttttatttttcgagtttaagtaatttttttattttagtgttttaagtagttgggattataggcgttcgttattaagtttaggtaatttttgtatttttattagagattgggttttgttatgttgattaggttggttttaaatttttgattttaagtgatttatttattttagttttttaaaatgttgggattataggtatgatggtgtttagtcggtttattgtttttattttattttattttattttattttattttattttattttattttattttatttttgagatagagttttgtgttgtcgtttaggttggagtgtagtggtgcgaatttggtttattgtaatttttttttttcgggtttaagtgatttttttgttttagttttttgagtagttgggattataggtatgtgttattacgttcggttaatttttttttatttttagtagaaatcggggtttatcgtgttggttaggttggtgttgaatttttggatttaagtgattcgtttgttttagtttcgtaaagtgttgggattataggtatgagttatcgtgtttggttttttaatttatttttaagtttgtttttagatagttaggtttgtttttttataataaagagtgttgaattttgtcggtgtatttcgtatggtgttattataatattgaaattagtgattattttagggtttgttattagagcgtgtttgtcgtatttattgtatttgtagtttggagtatagtagatttaaatgtttgtatgttagttttttttttgtatagtttggattaatattgatgttagtagatttttttgtataattgattagttttcgtaattattatagtttttttattgttagttattttgtgatgggattaagttaggttttgaattttttaattttagttttttggttattattgagtatatattgaataaggtaaaattgatttattttttttgttttgtttttttgtggtagaattttaggggtatagattgttgggttttaaatgtcgttttatttgttagtcgtatggttaagttattgaattttttggtgttttggtgttttatttataaaaagggggtggggttgtttgttcgataggggtgttaggaagattgagtttattagtatagatatgttgagagtagtatttgtttaaagttttttattattggttattacgtggtattgtgtgtatagtggggatgttgtgggtttggttttagattattgtagtaaagtgaatttagtaagaaagtgagttatatatatattttggttttttagtatgtgtaaaagttattagattaggtcgtgtgtagtggtttatgtttgtaattttagtagtttgggaggttaaggtaggaggatcgtttgagttaaggagtttaagattagtttgggtaatataggaagattttttttattttaaaaaaaaaaataaagttaaaagtggtggtatgtatttggggttttagttattcgggaggtagaggtgggaggattatttgaatttatgaggtcgaggttgtagtttgttatgattgtgttattgtattttagtttgggtgaaggagtgagattttgttttaaaaaaaaaaaaaaattagttgggcgtggtggtttacgtttgtaattttagtattttgggaggttaaggtgggtagattacgaggttaggagatcgagattattttggttaatacggtgaaatttcgtttttattaaaaatataaaaaaaattagttaggtatggtggtatacgtttatagttttagttttatgggaggttgaggtaggaaaattgtttgaatttgggaggcggaggttgtagtgagtcgagattatgttattgaattttagtttgggtaatagagcgagatttcgttttaaaaaaaaaaaaaaaattatttgagtttttagcgatttataatttttttgtaggtggagggttttgttttaaatttgtcggtttaaaggatatatatttattattttatgtaggttagaaatttgatgtgggttttatcggatgaaaattaaggtgtaagtaggttgtatttttttttgggggttttaggggagaatttgttttttattttggggtgttggtagaaggtggtagttgtaagatttaggttttattttttttattggttttaaattgagggtcgttgttcgtttttggaggcggttttatttttcggtttatgttttttttttttatttttaaagttagtatttgcgggttgtatttttttttgattcgttttttaacgttgttcgttttttgtagttagaaaggttttgtgtttttaagggttgaagtgattagattgggtttattttagataatttaggataatttttttattttaaggtttgtatttttagttatatttgtaaaatcgttttggttacgtaaagtaatatatttataggttttagggattagggtatgaatatttttcggtgggtttattttttttgagatggagtttcgttttgttatttaggttggagtgtagtggtatgatttcggtttattgtaatttttgttttttgggtttaaatgatttttgtgttttagttttttgagtagttgggattataggcgtgagttattaagttcggttaatttttgtatttttagtagagatggggttttgttatgttttttaggttggttttgaatttttgagtttaggtgatttattcgttttagttttttaaagtgttgggattataggtatgagttattgtgtttagtgggtttatttttttgtttattgcggatgtttttttgggtagttttgttttagttgttatgtagtcggtttgaagaagttggtttgatagagatttgtaatttgttttgtatggtttattatattttatttttagagataaggttttgttgtgttatttaggttggaatgtagcggtataattatagtttattgggttttagtgatttttttgttttagttttttgagtagttaggattataggtgtatgttgttatattaagttaattattattttttgtttaggtagggtttttgttgtgttgtttaggttggttttgaatttttgagttttattgattttttcgttttggtttttcgagtagttaggtttataggtatatgttagtatatttagttaattattaattattattttttgtagagatagggtttcgttgtgttgtttaggttggttttgaatttttgggttttagtgattttttcgttttagttttttgagtagttaagattataggtgtatgttattatatttagttaattattattttttgtagagataggttttcgttgtgttgtttaggttggttttaaatttttgggttttagtgattttttcgtttcggttttttgagtagttaggagtataggtgcgtgttgttatatttagttaattattgttttttcgtagagatagggttttattgtattgtttaggttggttataaatttttgagttttagtgattttttcgtttttgtttttcgagtagttaagattataggtgtatgttattatagttagttaattatttttttttgtagagatagggtttcgttttgttgtttaggttagtttcgaatttttgggtttaagtgatttttttgttttggtttttcgagtgtagagattataggtatgagttattgcgtttagttatggtttgttgtattttagacgagtatttttggcgtagaggtgttagagtaatttaatattttataatttttttttatttaatttatattagatatttttgttgggttagtttttttaatacggttttgatgttattggttttatttttttttgattgttttggtgtttgttaattatggaataagatggataagtgtgatgtttttgtttttttttcgattgtttttagttatttttttggaggtgtttttttttttttgtatgtggttagttttacgtttgttttttgtgtgtttttagaattagttattttttaatggtgtttttgtttgagtagttttttgtgttcggtttatatagagttgttaatttttttttgaggttgttatatttttttttttgggaatttcgtaggcgtgagttgtatttgttttatttttttgtggttgtttatatatatttttttttttttttttttttttgagacggagttttatttttgttgtttaggttggagtgtaatgacgtgattttggtttatcgtagtttttatttttcgggtttaagcgatttttttgttttagttttttgagtagttgggattataggtatgtgttattatgtttggttgattttggatttttagtaaagacgaagtttttttatgttggttaggttggtttcgaatttttgattttaggtgattcgttcgtttcggttttttaaagtgttgggattataggtatgagttatcgtgtttggttagttgtttatatatattttattttttttttgtagagggtttatttttgagggaagtattaggaaggaattatagggttttaggttgggtattaagtcggtattttgagttttttgtttcgttttttacggttgtttgcgatttttttggttttagtaggtgtgatcggtgttattatagttttattagggaagggatgtcgttaaagttattttttcgttagttttttattgtttgtttgggattttatttgttattttggggttaggtaggttaaatttagtttttattggatgaaatattttaggggttttgaaggtttttttattttttttgttaggttaaatattttagtttatatgaggggttgaaagaaagtagatttattttgtaaggatattttggttttcgtaattagttgaattttgttttttatattttaggtaatttcgggattaggggattggttggtttggtcgaggtagaagttatgtttttttagtttttttagcggcgtgattgagaagttaagtgtaacgttattattatagcgtgtgtgtttttggttggaagtattagtttttgtagtttttttgatttaaggttttttttggattttagttgttataagggtagaatgatttttgtttggaagaggttttttgtgtttttggaaattttgatgttaaagtattttttttttttttttttttttttttgagatagggttttgttttgttgtttaggttgaataggttggattgtagtggtattattataatttattgtagttttaattttttaggtttaagcgatttttttattttagttttttaagtagttggtattataggtgtatattaattatatttagttaatttttatattttttttgtagagatgggattttttagtgtagtttaggttggttttaaatttttgattttaagtgatttttttgttttggttttttaaggtgttgggattataggtatgagttattgcgttttgtttggttttgtagtattttgagtttaagtgatatagtatatataatatatagtttatattattattgtgtttgtagggtgttaagtgttttttttatagagtagttttttttttttttttttgagatagagttttgttttgttgtttaggttggagtgtagtggtatgattttggtttattgtaagttttatttttcgggtttacgttatttttttgttttagttttttgagtagttgggattataggcgtttattattacgtttggttaattttttgtatttttagtagaggcggggttttattgtgttagttaggatggtttttattttttgattttatgattcgtttattttagttttttaaagtgttgggattataggcgtgagttatcgtgttcggttttatagaatggttttttttaattatatagtaagttaggaagtttttgtttagtgatatttatatttaattatttagttttttgtttggagtagggtttggtatttagtaggtgtttatatgtgagcggcgttggtggggaattagggttcgtatgatttagagtagttgttgtaagatatgggtttagtaaagtattttttatgttgttgtttgtatttattttttaggaaggttagtttggaggagttatttttgttttttaggtaaatgataattgagtatttgtttgtgcgggtgttaggtggaaaggtttagagatggtagtggtttggtttttgtttggggtattttttttttattaatagatatttatttagttggttaggtttgtttttatttcgtagtttgtagttagtatttaggttgggaataatagtttgtgtttttttttttttttttggtattttttttttttgtttttttatttttttttgaagagataggatcgttttatgttgtttaggttggattcgaatttttgtttataagttatttttttattatagttttttgagtagttggggttataggtacgtagtatcgcggtattgtatcggttattgtttttttatttttttttttttttgtttttgaaagagttaagttattaattgttagtaattaaattagattacgattttttaggtaaatttttggtagttttatatttaggaatgattagttagagatattttgaagaatgagttattcggggaggcgttagttattttttttaattttatttttatttgttttttgtgtgggtattttttgtttttttggatgtttgatttttttattttatttttaaaatgttattattttttattaggtttttaggaatattagttggttgttttttatagtgttttgtggttttgggttatttattttgatattggttatattgtggtatattttgttatgggttgttgttagatttaattggagaaagattagttgtaggttattttttttacgggagtgttttaattatatgatttgtttttttttttttggtatttttttgagttagggttttattttgttttttagattggagtgtagtgatgtaattacggtttattgtggtttcgattttttaggtttaggtgattttttttttttagttttttaagtaattgggattataagtatatgttattaaatttagttatttttattttattttattttattttattttgagatagagttttatttttgttgtttaggttagagtgtaatggtgtgattagtttattgtaatttttgtttttcgggtttaagtgatttttttgttttagttttttaagttgttgggattatagttatttattattacgtttggttaatttttgtatttttagtagagatggggtttcgttatgttggttaggttggttttaaatttttgattttaggtaatttatttattttggtttttaggtaatttatttaattgttgttgtatgttgggattttaggtattagttattacgtttagttattaatttttgtatttttgtagagatggagtttcgttatgttttttaggttggtttgaacgtttgggtttaagtgattcgttcgttttggttttttaaagtgttgggattataagcgtgagttattatgtttggtttttggtattttttaaaatatataggttgggtatgatggtttatgtttgtaattttagtattttgggaggttgaggtaggtggatcgtttgaggtcgggagttcgaaattagtttgattaatacggagaaattttgtttttgttaaaaatataaaattagttgggtgtggtggtgtatgtttgtaattttagttattcgggaggttgagttaggagaatcgtttgaatttgggagtcggaggttgagttgagattatattattgtattttagtttgggtaataagagtaaaattttattttaaaaaaaaaaaatatatatatatatatatacgtatatatacgtgtatatatatatatatatatatatgtatatatatatacgtatgtatatatatatatacgtatatatatatatatatatgtatatatatatatatatacgtgtatatatatacgtgtatatatatatgtatgttagatatggtgatttatgtttgtaattttagtattttaggagattgaggtaggcggattatttgaggttaggaatttaagattagtttaattaatatggtgaaattttgtttttatttaaaatataaaaaattaacgaggttggtggtatttataattttagttatttgggaggttgaggtgagagaattatttgaatttagaaggtgagggttgtagtgagttgagatcgtattattgtattttagtttgggtaatagagcgagattttatgtttgtttgtttgtttatttatttgtataatgtatatgtatgtatgtatatatgtgtgtgtatatatatatatatatatatatatatatatatatatatattttgttatagagttgttgtgtgtgtgtgtatatatatatatatatatgtatatatatatatatatatatatatatgtatatatatatatatatatatatatatatatatatgtatatatatatatatatatatatatatatatatatgtatatatatatatatatatatatatatatatatatgtatatatatatatatatatatgtatatatatatatatatatatatatatatataattgtgttatagagttgttatgtaattttataattattagaaaaatgatttttaaaaggggaattttgtttagattagatgattttttagtattaggtattttagtaggatattttagatttttgcggggagataaaagttagtttagttttttttaatatttatatgttaaatttgtttgtgtttaaaatttttttagaattgtgatatttttataggtaaatgaagttgtttaataagtgtttgtatttttttttttattttttttttttagg

SEQ ID NO: 22 - DNA, 18060 bp, Artificial Sequence
  chemically treated genomic DNA (Homo sapiens)
tttgggaggaagaaataggggagaaaatataaatatttgttaagtaattttatttgtttgtaagaatattatagttttaaagaagttttggatataaataagtttaatatatgagtgttagaaaaaattaagttggtttttgttttttcgtaagagtttagagtgttttattggaatgtttaatgttaagaagttatttgatttgaataaggttttttttttgggggttatttttttgatgattgtgagattatatagtagttttgtaatataattatgtgtatgtgtgtgtgtgtgtatatatatatatatatatgtgtatatatatatatatatatgtgtatatatatgtgtgtatatatatatatatatatgtgtatatatatgtgtgtatatatatatatatatatgtgtatatatatgtgtgtatatatatatatatatatgtgtatatgtgtatatatatatatgtgtatatatatatatatatatatatagtagttttgtaatagagtatgtgtgtatatatgtatgtatatatgtgtatatatatatatatatatatatatatatatatatatatattatatagatagatagatagatagatagatatggagtttcgttttgttgtttaggttggagtgtagtggtgcgattttagtttattgtaatttttattttttgggtttaagtgatttttttattttagttttttaagtagttgggattataggtgttattagtttcgttaattttttgtattttgagtagagatagggttttattatgttggttaagttggttttagatttttgattttaagtgattcgtttgttttagttttttgaagtgttaggattataggtatgagttattatgtttggtatgtatatatatatatacgtatatatatatacgtatatgtgtgtatatatatatatatatgtgtatatatacgtatatatgtgtatatatacgtatatatgtatatatatgtgtgtgtatatatatatatacgtatatatacgtgtgtatatatatatatattttttttttttgagatagggttttgtttttgttgtttaggttggagtgtaatggtgtgattttagtttaattttcgatttttaggtttaagcgatttttttggtttagtttttcgagtagttgggattataggtatgtattattatatttagttaattttatatttttagtagagatagggttttttcgtgttggttaggttggtttcgaattttcgattttaggcgatttatttgttttagttttttaaagtgttgggattataggtatgagttattatgtttagtttgtatattttaaaaggtattagagattaggtatggtggtttacgtttataattttagtattttgggaggttaaggcgagcggattatttgagtttaggcgtttagattagtttgggaaatatggcgaaattttatttttataaaaatataaaaattagtggttgggcgtggtggttgatgtttggaattttaatatatagtagtagttgggtggattatttgagggttaaggtgggtggattatttgaggttaagggtttgagattagtttggttaatatggcgaaattttatttttattaaaaatataaaaattagttaggcgtggtggtgggtggttgtaattttagtaatttgggaggttgaggtaggagaattatttgaattcgggaggtagaggttgtagtgagttggttatattattgtattttagtttgggtaataagagtgaaattttgttttaaaataaaataaaataaaataaaataaaaataattgggtttggtggtatgtgtttgtggttttagttatttgggaggttgaggaaggaagattatttgagtttgggaggtcgaggttatagtgagtcgtgattgtattattgtattttaatttaggagatagagtgagattttgatttaaaaagatattaggaaagagggggtaggttatatagttggggtattttcgtaagggaaatgatttatagttggtttttttttagttgggtttgataatagtttataataaggtgtgttatagtatggttagtgttagaatgagtagtttagggttataggatattgtggggaatagttagttgatgtttttaaaggtttggtggggggtggtggtattttgaggatgaaatgggggagttaagtatttagggaagtaaggggtatttatatagagggtagatagaggtgaagttagaggaggtggttggcgttttttcgaataatttattttttaggatgtttttagttagttatttttaaatgtagaattgttaggagtttgtttgggaaatcgtggtttgatttgattattgataattagtagtttgatttttttagggataaagagggaaaaaaataaaagaataatagtcggtgtagtgtcgcggtgttgcgtgtttgtaattttagttatttaggaggttgtggtgggaggatggtttgtgggtaggagttcgagtttagtttggataatatagggcgattttatttttttagaaaaaaataaaggaataagaagagaaggtattaaggaaagggagaggaatataggttgttgtttttagtttgggtgttaattatagattgcggggtgagaataggtttaattagttgggtaagtgtttgttggtggagagaaggtgttttaggtagggattaggttattgttatttttggatttttttatttagtattcgtatagataggtgtttagttattatttgtttgaagggtagaagtggtttttttaggttggtttttttagagggtaagtgtaggtagtagtatgaggaatgttttgttggatttatgttttataatagttgttttgggttatgcgggttttgattttttattagcgtcgtttatatatgagtatttgttgaatgttaggttttgttttaggtaaagagttaagtgattagatgtaggtgttattaggtagggattttttgatttgttgtgtggttaggaaagattattttgtagggtcgggtacggtggtttacgtttgtaattttagtattttggaaggttgaggtgggcggattatgaggttaggagatggagattattttggttaatatagtgaaatttcgtttttattaaaaatataaaaaattagttaggcgtggtggtgggcgtttgtagttttagttatttaggaggttgaggtagaagaatggcgtgaattcgggaggtgaagtttgtagtgagttaagattatgttattgtattttagtttgggtaatagagtaaaattttgttttaaaaaaaaaaaaaaaagattgttttgtagaagagatatttagtattttataaatatagtggtaatatagattgtatattatatatattgtattatttggatttaaggtgttataaggttaggtaagacgtagtggtttatgtttgtaattttagtattttgggaggttaaggtaggaggattatttgaggttaggagtttgagattagtttgggttatattgagagattttatttttataaaaaaaatgtaaaaattagttgggtgtggttagtgtgtatttgtggtattagttatttgggaggttgaggtgggaggatcgtttgagtttgggaggttgaggttgtagtgagttatgatggtattattgtaatttagtttgtttagtttgggtaatagaataagattttgttttaaaagaaaaaaaaaaaaaaaaaaagatgttttgatattaggatttttaggagtataaggaattttttttaggtaaaagttattttatttttgtagtaattggggtttaaggagagttttaagttaggagggttatagaaattggtatttttagttagaggtatatacgttgtggtaatagcgttatatttgattttttagttacgtcgttgagaaaattggaaggatatggtttttatttcgattaagttagttagttttttgatttcgaggttgtttggggtgtgaaggataaggtttaattgattgcggagattaaggtgtttttgtagaatgggtttgtttttttttaattttttatatgaattgggatatttagtttggtaaagagaatagagaaatttttaaaatttttagaatgttttatttagtagaaattggatttaatttgtttggttttagagtggtaggtgggattttaggtaggtagtgaggagttggcgggagggtaattttagcgatattttttttttggtaaaattgtgatgatatcgattatatttgttgaagttaggagggtcgtagatagtcgtgaaggacggagtagaggatttagaatgtcggtttagtgtttagtttgagattttatgatttttttttagtgttttttttagagatgaattttttgtagaggggagataagatatatataaatagttggttaggtacggtggtttatgtttgtaattttagtattttgggaggtcgaggcgggcggattatttgaggttaggagttcgagattagtttgattaatatgaagaaatttcgtttttattaaaaatttagaattagttaggtatggtggtatatgtttataattttagttatttaggaggttgaggtaggagaatcgtttgaattcgggaggtggaggttgcggtgagttaaggttacgttattgtattttagtttggataataagagtgaaatttcgttttaaaaaaaaaaaaaaaaaaaaagatatatataaataattatagaggaataaggtaaatatagtttacgtttgcgggatttttaagagaaagggtataatagttttaggaagaagttgatagttttgtgtgaatcgggtataggaagttgtttaaataggggtattattgagaagtggttggttttggaaatatataagaaataaacgtgagattggttatatatagggagggaaaggtatttttagagaggtggttggggatagtcggagggagggtaaaagtattatatttatttattttgttttatagttaataaatattaaagtagttaaggggaagtagaattaatgatattagagtcgtgttaagaaaattaatttagtagaggtatttagtatagattggataggaagaaattataaaatgttagattattttaatatttttacgttagaaatgttcgtttgaaatatagtagattatggttgggcgtagtggtttatgtttgtaatttttatattcgggaagttaggataggaagattatttgagtttaggaattcgagattagtttgggtaatagagcgagattttgtttttataagaaagaataattagttggttgtggtagtatgtatttatagttttagttattcgggaggtagaggcgggaggattattagagtttaggaatttgtgattagtttgggtaatatagtgagattttgtttttacgagaaaatagtaattagttgggtatgatagtacgtatttgtatttttagttgtttaggaggtcgaggcggaaggattattagagtttaggaatttgagattagtttgggtaatatagcgagaatttgtttttataaaaaatagtaattagttgggtgtggtggtatgtatttatagttttagttatttaggaggttgaggcgggaggattattagagtttaggaatttaagattagtttgagtaatatagcgagattttgtttttataaaaaatagtaattagtaattagttgggtgtgttagtatgtgtttataggtttagttattcgggaagttaaagcgggaggattaatagagtttaggaatttaagattagtttgggtaatatagtagagattttgtttaaataaaaaatagtaattagtttggtgtggtagtatgtatttgtggttttagttatttaggagattgaggtaggaggattattagagtttagtgagttataattgtgtcgttgtattttagtttgggtgatatagtaagattttgtttttaaaaataaaatatagtggattatgtaagataagttataagtttttgttaaattagtttttttaggtcggttgtatggtagttggagtagggttgtttaagaaggtattcgtagtaggtaaaagagtagatttattgggtatagtggtttatgtttgtaattttagtattttgggaggttgaagcgggtagattatttgagtttaggagtttaagattagtttgggaaatatggtaaaattttatttttattaaaaatataaaaattaatcgggtttggtggtttacgtttgtaattttagttatttaagaggttgaggtataagaattatttgaatttaggaagtagaagttgtagtgagtcgagattatgttattgtattttagtttgggtgatagagcgagattttattttaaaaagagtggatttatcgaaaaatgtttatgttttaatttttggaatttgtgaatatattattttacgtggttaaagcgattttgtagatgtaattaagaatatagattttgagatggggagattattttggattatttggggtgggtttaatttaattattttagtttttaagaatatagaatttttttagttgtagagagcgggtaacgttggaggacgggttagagagagatgtaattcgtaaatgttgattttaaaggtagaggaagggggtatgagtcgagggatgagatcgtttttagaagcgggtaacgatttttagtttagaattagtgaagaaaatgggatttgagttttataattattattttttgttaatattttaaaataggaaatagatttttttttggagtttttagaaaggaatgtagtttgtttatattttgatttttattcggtgaaatttatattagatttttgatttgtataaggtaataaatgtatgttttttaagtcggtaagtttgaggtaagattttttatttgtaaaaagattatgaatcgttgaagatttagatgattttttttttttttttgagacggagtttcgttttgttgtttaggttggagtttagtggtatgatttcggtttattgtaattttcgttttttaagtttaagtaatttttttgttttagttttttatggagttgggattataggcgtgtgttattatgtttggttaattttttttgtatttttagtagagacggggttttatcgtgttagttaggatggtttcgattttttgatttcgtgatttgtttattttggttttttaaagtgttgggattataggcgtgagttattacgtttagttgatttttttttttttttgagatagagttttatttttttatttaggttggagtgtagtggtataattatggtaaattgtagtttcgattttatgggtttaagtgatttttttatttttgtttttcgagtagttgggattttaggtgtatgttattatttttggttttatttttttttttgagatggggggggtttttttatgttgtttagattagttttgaattttttggtttaagcgatttttttgttttggttttttaaattgttgggattataggtatgagttattgtatacggtttagtttaataatttttatatatattaggaaattaaaatgtgtgtgtgatttatttttttgttagatttattttattgtagtggtttggaattaaatttatagtatttttattgtatatatagtattacgtaataattagtgatgaagggttttggataggtgttgtttttaatatatttgtattgataagtttagtttttttaatatttttgtcgagtaggtagttttattttttttttatagatgaaatattaaggtattaagaagtttaataatttagttatacggttggtaagtagggcggtatttgaaatttagtagtttgtatttttagaattttattataggggagtaaaataaaagaggtaagttaattttgttttatttagtatgtatttagtagtagttaaggaattggagttaaggagtttaagatttagtttaattttattatagaatgattagtagtaagaaagttgtggtagttacgaaagttaattagttgtgtaaaggagtttgttagtattagtgttaatttaggttgtataggggaagagttggtatgtaagtatttgagtttattgtgttttaagttgtagatatagtgaatacggtagatacgttttggtaatagattttgaaataattattaattttagtgttataatggtattatgcgggatatatcgataaaatttaatattttttattgtggagaagtaagtttagttgtttgagagtaggtttaagaatgaattaaaaggttaggtacggtggtttatgtttgtaattttaatattttgcggggttgaggtaggcgaattatttgagtttaggagtttaatattagtttggttaatacggtaaatttcggtttttattaaaaataagaaaaagttagtcgggcgtggtggtatatgtttgtaattttagttatttaggaggttaaggtaggagaattatttgaattcgggagggggaggttgtagtgagttaagttcgtattattgtattttagtttgggcgatagtataagattttgttttaaaaataaaataaaataaaataaaataaaataaaataaaataaaataaaataaaataaaaataatgaatcggttggatattattatatttgtaattttagtattttgggaggttaagataagtggattatttgagattaagagtttgaaattagtttggttaatatggtaaaatttagtttttaataaaaatataaaaattatttgggtttggtggcgggcgtttgtaattttagttatttgggatattgaagtaggagaattgtttgaattcgggaggtggaggttgtagtgagtcgagattacggttattgtattttagtttgggcgatagagtaaggtttagtttcgagggggaaaaagaaaaattagttgggcgtggtggtgtatatttgtaattttagttatttgggaagttgagataggagaattgtttaaattcgggaagcggaggttgtagtgagttgagattatattattgtattttagtttgggttatagagtaagattttgttttaattaaaaaaaaaaaaaaatttaagttttaagtattgttggatattatgtttattttttatttaatgaaatatttttaaaatgtaaaaaaaaaaaaaaaagtttgtggagtgagttatataaattataattttaatgtttattatatggttaaaagtagttttttaaaattttaatgtttatagtgaagtaatttgagtgtaaagaaatgtggaatttagggttagtggtggattgtaaggtttatttaatggtattttaatttagttaaataaaatatttgtatagggttaatagagtttttgagttagtggtttattggtaatttttgttgaagggaaaggttttggtaagtagtagattttagtaggaatttttgttttttggtagttaatttttgtagtatttatttttaagaatttttgaggaataatggtcgggttttgtggtttacgtttgtaattttagttttttgggaggttaacgtagaggattgttttagtttaggagtttaagattagtttgggtaataaagtaagatttttatttttaaaaaaaaaaattttttttttttttgagatagagtttcgtttttgttgtttaggttggagtgtaacggtgtaatttcggtttttgggtttaagcgattattttgttttagtttttcgagtagttgcgattataggtatttgttattatatttggttaatttttttgtatttttagtagagatggggtttcgttacgttggttaggttggttttaaatttttgattttaggtgatttgtttattttagttttttaaagtgttgggattatagacgtgagttatcgcgtttagttttttaaaaaattttttaaggattaatttgggtatggtggtatgtgttagttatttaggaggttaaggtaggaggattgtttgagtttaggggtttaaggttgtagtaagttatgattgtgttattgtattttagtttgggtgatatagtgagattttgttttttaaaaaaaaattgaaaaaaataagttaagttagttattagtatgtgaatttttatgtgttatgtatatttttatttaatttaatattagttgaaaatttatgttattatttttagattatggatatagaggtggtatacgtttgtttaaggttattgagttagtggaggttatgtttttaagaaggttgggtaggttgggtatggtggtttatattcgtaattttaatattttgggaagttgaggtaggaggatcgtttgaggttaggaatcgaagattagtttgagtaatatggtaagattttatttttataaaataaaaaaaaggaataaaaaaggaaggtcgggtttaaatttttttgaattgggtgtaatattatgaagttaggtatttttataattttatttttattttattttaaattaagttttattttgggagaatattggtatagatgatttaagaagatatatatttattaattggttaagaagtggtttgattataattttagtattttgggaggttgaggtaggtggattacgaggttaggagttcgagattagtttgattaatatggagaaatttcgattttattgaaaatataaaaattagttaggcgtggtggtgtgtatttgtaattttagttatttcggaggttgaggtaggagaattatttgaattttgaaagtggaggttgtagtgagtcgagattacgttatcgtattttagtttgggtgaaagaatgagattttattttaaataaataaataaaaaaaagtagtagttaaggtatgatggtttatatttgtaattttaatttttgggatataaaggtaggaggattgtttgagggtaggggtttaagattagtttgggtaatatggtgaaattttacgtatatagaaataaaaattaagaaagttatttgggtatggtggtgggcgtttgtggttttagttatttaggaggttgaggattttttaagtttaggagtttaaggttatagtgagttataattgtgttagggtattttagtttggataatagagtgagatttatttttaaaaataaaaagtgtttttttttttgagatagggttttattttgttatttaggttggagtgtaatagcgcgattttagttcgttatatatagttttaatttttggggtttaagtgatatttttattttagtttgttgagtagttgggattataggcgtacggtattattttaggttaatttttgtatttttagtagatatggggttttgttttgttgtttaggttggttttaaatttttggtttaagagattcgttcgttattgttttttaaattgttgggattataggtataagttatagtatttagtttttaaaaaaaaaaaaaaaaagaaaagaaaaaaagcgggggttgaattaaatatttatttttttttaaagatttaaattagaatcggattggtttaattaggttagttaataagtttaaggaaatagaaaaatggtaaagagtgtttttataaatttagttggaagtgtttacgtttggtgagggtttttttgatttacgtatattttatttgaataagtttttaggaatgaattgatggcgtttatgaataaggggttgggattagtgtttttattgatttttgtgtacggaagttggatagaggtatgaattgttaaagttagggtttttaatattagatatatattaaagaatatatttatgaatatatataaatatatacgaaagtgtagttagtttttattagtaagatttttttgatgtttacggtttataggtatagatttataggaaaagattaattatgtagtttttacgtttttcgggttttgcgttgtaatgtacggttaaagtttttgttaaaatatggatttttttaaggagtaagaattatatagttttaattgatagaatgagtattttacggaaggttgggttttcgaatatgagttagtttagtttaggtttcgacgggtgatattcgtttttggaggtcgttatcgagatgtatagttttgggggaaaggtattgagggattttttattatagaagcgttttcggggatcgggtcggatatcggaagtggaggtcgaagtgtcggtgttcgaggggtgttcgttggtcgcgggttgtttattttttgtgcgattaagttggagttaagagttcggtttatcgttgtttgaagaaggggatttcggaaacgaatttaaagtttgttgtatttggggattaaaagagaatttttatttcgtttagtttttagttattagggagttacgggggaatttacggtttattttggcgttaaatagttcgggtacgcgcgatcggaagtgttattttgttcgcgttaattgtcgttgcgcgtcgtattattttacgtatgcgcgttcgtttgttagtagcggttatcggttatttcgaggggaagcgattttttatttagcgttttgtttgtttttttgagttcgtgtttttttttatggtatttatcgtttgcggatatcgtcgggtagcgagatggtcgggacggttagtgtgggtattcgggttggggcggtacgcgtcggtatttcggaggttttagtagacgcggcggcggtagcgtaggcgtttcggtttttcgcgcggaaatcgatggggaggggcgatgagcggaggcggcgtttattattttagttcgggcgtgggggaggaggggatgtattaaacggagagaggcgatattttgtgtagaaggatggaacggagtcggttatgtttagggaatacgtatgcgtaaggcgggtatatattttttttacgcggagtagtgggttcgtttaagttttacggtttgttgggaggtgggtacggtgttcgaggtatttatttatttatttttttaggtgtgatggggataaagtagcgagaagtttttaagggtttgtgagagtttttgagtaaagtttttagttttaatttaatttttatttatttgttggttatacgattttaggtgggttattacggtttagtttttgtgtttttatttgtaaaacggggtaattgtatttattttagaaaattttgagtatatatagaatttgtagttagtattaagaattttatagtgtatagaggtttatgttatttttatatttagtgtgtggggggttttttgttgttttttttaagtattacgtggtttacgtttgttattttagtattttgggaggttagggtgggaggatcgtttgagtttaggagttttagattagtttaggtaatatagagaaattgtattttaaaaaaaaaaaaaaagaaagaaagaaagaaagaaaaaaagaaaaataaaaattagttagtcgttgtggtatgtgtttatagtttaaattattttagaggttgaggtaggaagattatttgaatcggagaggtagaggttgtagtgagttatgattgtattattatattttagtttgggagatagagtaagattttgttttaaaaaaataaaaataaaaagtaagaataaattaagaagtattatgttaggcgtagtggtttacgtttgtaattttagtgttttgagaggtttaggtgggaggatcgtttgaggttaggagtttaagattagtttgagtaatatagggatattttatttttataaaaaatataaagatttgttgggtatggtgatatatatttgtaattttagttatttgggaggttgaggtgggaggatggtttgaattttggtagtgtaggttgtaatgagttatgattgggttattggatttttgtttgggcgatagggtaagattttgttttattttgttatttcggttggcgtgtagtggtgagattttggtttattgtaatttttgttttttaggtttaagcgatttttatgttttagtttttttagtaggttgggattataggcgtattttattacgtttggttaatttttgtattttcggtggtagagatagggttttattatgttggttaggttagtttgggatttttagttttaagtagtttatttgttttagttttttaaagtgttgggattataggtttaagttatcgtaattagttagaattttttttttttttaaagtattagaatatgggggaaagattgtgtttttaataaatggtgttgagaaaattgtataattatatataaaagaatgaagttggatttttattttatattatatataaaaatataaaatttattaaagattaaatataagatttgaaattatagtgtttttagaagaaaatatggggaaaagttttatgataatggatttggtaatgattttttggatatgatagtaaaatataggtaataagataaaagatagataaatgggtttgtaataaatttaaggatagttatatagtaaaagaaatgattaatagtgaaaaggtaatttatagaatggggaaaaaaaaagtttgtaaattgtattatttggtaaagggttaatattcggaatatatgaaaaattatagttaggtatggtggtttatgtttgtgatttttgtattttgggaggttcgggtaggtagattatttgagttcggtagttttagattagtttgagtaatatggtaaaatttcgtttttattaaaaaaagaagaaaaaaattatataaaaaataaattattattcgttaggtttggtggtttacgtttgtaattttagtattttgagaggttaaggcgggtggattatttgaggttaagagtttgagattagtttggttaatatggtgaaattttgtttttttttaaaatataaaaatttgttgggtatggtggtgtgtttgtaattttagttattcggaaggttgaggtaggagaattatttgaatttgggatgcggaggttgtagtgagtcgagattgtattattgcgttttagtttgcgtaataagagagaaattttgttttaaataaaaatttaaaaaataataaatttttataatgtaataataaaaattcgatttataaatgagtaaatgggttgggtgcggtggtttatatttgtgattttagtattttgggaggtttaggcggtaggcggattacgcggttaggagatcgagattattttggttaacgtggtgaaattttatttttattaaaaatataaaaaattagttaggcgtggtggtagtcgtttgtagttttagttaattaggaggttgaggtaggagaatggtgtgaatttaggaggtggagtttgtagtaagtcgagattgtattattgtattttatttagtttgggtaatagagcgagatttcgttttaaaaataaataaaaagagtaaatgatttgaatatatatttttttaaaggagatatgtaaatagaaaataggtatatgaaaagatgtttaatattattggttattagggaaatgtaaattaaaattataatgaaatatttttaagattttttagaatggttattgttaaataataagtgttggtgaagatgtggagaaattggaatttttgtgtacggttgagagtcgaataaaatggtggagttgttatgagaaatagtatggaagttttttaaaaaaattaaaaatagaattattatatgatttagtaattttatttttggatataaatttaaaagaattgaaaagaggattttaaagagatatttgtatattcgtttttattgtagtattagttataatagttaagagataggaaaaaaaaaaaaaaagattatattgttgttaagagatggggttttgttgtgttgtttaggtaggtgttaaatttttgggtttaaggtatatttttattttagttttttaagtagttgggattataggtatgtgttattataatgggttaattttttatattttttgtagagataggatttttttatgttgtttaggttggttttaaatttttgagtttaagcgatttgttggttttggttttttaaagcgttgggattataggtgtaagttattgtatttagtttaatttagtttttaaaaaagaaaaaatggttaggtgtagtggtttatatttgtaattttaatattttgggaagttaaggcgggtggattatttgaggttaggagttcgagattagtttggttaatatggagaaattttatttttattaaaaatataaaattagttggatatagtggtttatgtttataattttagttatttcggaggttgaggtaggagaattgtttgaattttggaggtggaggttgaggtaagttgagattatattattgtattttagtttgggtaataagagggaaattttattttaaaataaataaataaataaataaataaataatataaaagtaaaaatataaaattagttgggtatggtggtatgtatttgtaattttagttatttaggaggttaaggtaagagtattgtttgaattcgagaggtggaggttgtagtgagttgagattatattattgtattttagtttgggtgataagagtgaaatttcgtttttaaaaaataaaagaaaagaaaaaatattttattatatgttataatatggatgaattttgaggatattacgtatagtgagagaatttaattatataaagataaatattatataattttatttatgaagtatttaaagtaattaaaattttagaaatagaaagtagaatagtggttattaaggtcgggggggaaggaggaaaaggagttattgtttaagagttttagttttataaaatgattttagagatttgttgtataataatgtgtatatattgaattgtatattgaaaaattgataagatggtaaataaaatattattagtaaatggggttaagttttttttttttttttttttttttttttttttttttgatagagttttattttgttgtttaagttggagtgtagtggtacgatttcggtttattgtaatttttgttttttgggttttagtaattttttttttttagtttttcgagtagttgggattataggtacgcgttattacgtttagttaatttttgtatttttagtagagatagtgttttgttatgttggttaggtttgttttgaatttttgattttaagtgattcgtttatttcggttttttaaagggttgggattataggtatgagttacggtatttagttttaaaaagtattttatttttaattataagaagtattagaaaggagtttaaaattagggtatatttttatatttttgtattgtaaaatatttgtattataaaatttataagtgaatgtgtttatatgtatgtatatatatatgtatatatagtttttttaatagttggtagggaagggttattttggttagaagtgaatttttatatagattttttatttgttatgaattgtttatatttggtaggatttaggaagattgaataataagattaaaatttttagcgattaatattgaattagtatttacgtagtttattaggttttttagataatttttttttttttaattttttttttttaatagagatagggttttattatgttgtttaggttggttttgaatttttgagtttaagtaattataggtatgagttattgtgtttggggttttttgtttttgttgtttgttttttgtttttgagattgagtttcgttttgtagtttaggttggagtgtagtggtgcgatttcggttgattgtaagtttcgtttttcgggtttacgtaatttttttgttttagttttttgagtagttgggattataggtgttcgttattaagtttagttaattttttgt

SEQ ID NO: 23 - DNA, 6071 bp, Artificial Sequence
  chemically treated genomic DNA (Homo sapiens)
ttggttcgttttattatatgttgatttatgtttagtttgttttatgtagtgttggtttttaaaatgggtattattaagttggattgtgattaatgcgagggatttgaattatgttaagtgatagtttatagtcgataggattgagaatgtattatttagaggatgttattgtataggtattttttatttaatatatatttatttgtattgtgttaggtatcgggttaagggtttttaatttttatagtaattgtatgttttattatttatatattttagaggtgtattttggtttaaaaaaggatgtagtgattttttttacgttatttagttagggagaagtagtagtagacgtgtgttttttgtttatattgtggttttgaagtttgtatttttaattataaagtaaattattatagaagagaaaaaatatatatatatttttttgagatggagttttatttttgtcgattaggttggagtgtaatggtataattttggtttattgtaatttttgttttttaggtttagtgatttttttgttttagtttttcgaggagtagggattataggtatgtattattatgagttattaatttttgtatttttagtagagacggggttttattatgttggttaggttggtttcgaatttttgatattaggtgatttattcgtttttgttttttaaatgttgggattataggtgtgagttattttatttagtttttaatcgattaatttttgtatttgtagtagagatgggtttcgttatgttggttaagttagttttgaatttttgattttaggtaatttattcgtttttgttttttaaagtgttgggattataggtatgagttatagtgtttagttagaagaggaataattttttaaaattagtgtagagggtaaatttaaaagaaattggaatttaggagattataaggaagaattttttaataattttagttgtttattatgaaatattttattagtagtttgtaagttgaggtttattgtttatggattaggaaaatagtagaaggtatttttaaataagtgggagtttagaagtggtaaatgagttttgttggtttttttaatttaaatttgtaaaatttatttttttgaggatattttttatagttagtttttttttatatgattttttttttttttatttaatttataaagatttttttttttggtataaagttagaatgtaatttatttatgattgaaattggtataagtagggtgtttttagattgtaagcgagtttgtataggaatttatattatgttttgttgagaaagagagtggtttggattacggaaatttaaagatgattgaaaaagtatttttagtatttggaaaattttattttatttaattagatattaatgattagtgaaagaatatataagggtagaagataaaaatgttattagattttaagtttagtgtttttaataattgagtgtgtgttattatttttttattatggtttttagtattgtgatgtgttttttaattatttttgatatgttttatatgtgtttttattttttaggtgttaattaatgtgttttttttttaaagaaacgtattttttgtttttagagaaaatgtagtaaatatattaatattttagttttgatatttgtttgtttttttaaaagtatgtttagtttttttaattaaaatataaatagtattgtatatattattgaggatgattttatgggaaattatgggattagagagtttttttttttttttatgagttttcgggatttgttttcggaaaaagtaattaatatttatttttattttgtttattttatttttttttttagttattttttattgtattatttttattagtttttttatttttttattaaattatgtaatttgtgttagtgattggaagatatttgtatatataattttagggggtttaatatttatagatgtttttatggagatagttgtaaattatgattatggagagagtttttatttttgaaataattattacgagataagttttagagaggaaataatatataaagatgtggtatatatgaggtgataattgggttagaataattggaaggattgaatgataagtataagggtgatttgtattttagaagatgagggagatttaggagttgtaatgtgttaggatattttaggttgggagtttagaaggaaggttttatttgaagtataggttttaaagaagtttaggagatttttagagaagggaaagaataaaagtagagaagtgaattgaagggtatgtttggggaatattaagtagttttatttatagtagagtttaagaagagaaaaaagttaaggaagaaaagtaagtttagggttatatcgtgaagatttttaagtattagagtaaatagtttgtaattagtttgtgtggggaaggggtttgaggttttttttttttaggaggttggtattttttattaattttgttatgtgtttgtattgttttttttttataggtaaggttttttgttatatttattttgatttatagtacgaatgttgaaaattttagatttgtttaatatattggtttttggttatatataaattattgtgattatatagttttttttatattttatgtattgatgtttatttttggtattatatgtaataaatatttaaaaagtttgttttatgtattatatatatgttagtgtgtatatggtttttgtaagttgagttagtttaagagtatatttgtttaaagtaggtaataagttttttttttatatattttaaatttaataaataattaatacgttgttaaattaggttttattttttttaatttgaatttagttatgaatttattttttggaattaaaatatttttaataatttatttttttttgtttttttttgttttattttatagatgaggaaattagggttattttaaagttatataattagttaattggtaacgttagggttaaagttgagttatttggtatttttttattatatatttttttttatttgaaagtgattaataaaaagtaaagtacgtggttaatgtatatgtataatttaaaaagttaattttatagattatattaaaaggaattagtgaatgttataatttggatgtagtggttatatttttatttgttaatagtattatattagtaggtatgtaatatttttaataaattagttattgttattataagtggtatttttaagttttttttaataaaaatttgtggtagtgttgggaataaagagaaaaatattttataacgggaatattttttattttttatatgggtatattatttttatttataattgattgtaaatatcgttttttttataaaatttttaagttttttttaattgattgattgaatatttttattaagcggattttaaagaaatttgaaaaattagtttaggttatgttgggaaagggaagttagatatgttttattatatttttttttttttggagtttaggtataattgattagtattattattaaaataagagatttttatatcgatataatagattttttttagtaataagatattaaaattttaatatgattttagtatagtattatatgaaagatagtaggttttaaattaaagtattttattttaaaataaatttttttgatattttttgaaatggttttatatagttattttttgtggggaaaatttatattttatagagattttttttttttttttaggtttttttttgatttaagagatatttaattaagagtttggtatttttttatatatgataagagatatttgttaattattttttttgaagtttgttacgtatgagatttcgtttatataataagaattttggtttttattttattttaatttagatatatttttttttattgattttaggtttttaggttataatttaatttttttaattaattgttaattagaaaatttttgaatttatttgtaatttggaattttttttttttttgagttgttttatttttatggattaaattaagtatattttttatatattagttaatgtttttatgtttttttaaaattatataattttaagttgtagtttaattattttgggtatatgttgttaggattttgtggggttgtgttatgggttacggtttttattttgtgtttagaataaatttttttaaatattttacggagtttggtttttttcgttaatatgagtttttaatagttggttattggattattttgaggaattaaggttatagtatttaaagatttataaataattttatatgatatttattgtgtattttatgtaggtgtaatttttaagttaaaatataattaattttattaatagatataataaatattttttgtattattagtacgtatatagggttttttttgttgcgagtggatttgtgtttttatttataattttggaattttttttaggggagaggttggtttaatttttttttattgatttagggtaggtaggaaataaggtatattgtggaaagaatgtttgaatgtttaggtttttaagtgatagaaaagtagtttgtttgaaaaatgatttttttttggtttttaattagtgttaatttatttggaaattaaggtagtttttttttttttattgaattttggattttttttttaattaaggtttttgatattaaagaaggaaatggagcgtaaattaggttatagagtggttgttatttattcgggaagttttattgtttttcgttttttgtttttttttagatttttgttaatttttaggtcgcgaggttttttgaagttttgagtttggagcggtaggagacgggggaattgaaacgtcgcggaattagaggttgagggagcggcgcgatggagggaggaggagcgacggatcggtaggtttagtttcggggttgcggcggttgaggcgcggggatggagtttttgcgggtgttggagttatatagcggcgtgggcggtatgtattacgcgttgagaggtgagagtttatttagtatttttttttttattcgtttacgggggttggttggagtattcgcgtcgggaaggggcggagcggcgagacgtaaggggcggatattgtggggcggatattgtggggcggttttcggttgttttggaaatagtttttgcgcgtcgtcgtgtttatttttttagacgttgattttttttttttggcgtcgagtttggttcgaggggtcgtatatggcgttttaaagggtttagttgggagtcgggattcgtaaggtagtaaattaattttaaagggtattaaaggggcgagattttcgtttggtgttaagtttttattttaagtgtgtagttatcgagaagtatggagattcggttttttattttggggggttttttagttggggagggagggagtgttaggggtttttttggtgagagatggattttggaagggataatagttataatttaaggtagaagtttgcgaatgttaaataggatggtagaggaagtttgaagaatttggacgtttgatcgttggaaagaaacgtgttttttgtagttttgcgtttagatgttagagaattgagttttagtttggtggtagtgtgacgttgggttatttcgtgaatagtgatgaatttgttttttggttttaaaagagaatgattattataaggattaaagtttgttaagtgtttgttagtgtttgatatattgtaattattttaaatattatatattattattattattattttaaaacgatattacgagatattattaagtaaattattatttttatgtacgtttttgattttgaggtttttgattttttttatgttgagttggaattgaaagttttatttttggtgatatttatttaaaattatttattgagtttttattttgtgttagattttgtgttaggagttggggatatagaatgataaataggttttgaaggtgtatgtttatttttaaattattaagataattatcga

SEQ ID NO: 24 - DNA, 6071 bp, Artificial Sequence
  chemically treated genomic DNA (Homo sapiens)
tcggtggttgttttagtaatttaagaataaatatgtatttttaaagtttgtttgttattttgtatttttagtttttagtataaaatttggtatagaataggagtttaataaataattttgagtgaatattattaaaagtaaaatttttagttttaatttagtatgaaagaaattaaaaattttaaaattaaagacgtgtataaaagtaatagtttgtttgataatatttcgtgatgtcgttttaaagtaatagtgataataatgtataatatttggagtggttataatgtattaggtattaataagtatttgatagattttaatttttataataattatttttttttaaaattaggaaataggtttattattgtttacgaagtagtttaacgttatattgttattaagttggaatttagttttttggtatttaaacgtagaattatagaagatacgtttttttttaacgattagacgtttaagttttttaagttttttttattattttatttagtattcgtaaatttttattttgaattgtagttattattttttttaagatttattttttattaggggagtttttgatattttttttttttttagttgggaagttttttaggatgaaggatcgagtttttatgtttttcggtggttgtatatttagaatgggggtttggtattaggcgagggtttcgtttttttgatattttttgaggttgatttattgttttgcgaatttcgatttttaattgggttttttgaggcgttatgtgcggtttttcgagttagattcggcgttaggagaagggagttagcgtttggaggggtggatacggcggcgcgtaggagttgtttttaggataatcgagggtcgttttatagtgttcgttttatagtgttcgttttttgcgtttcgtcgtttcgttttttttcggcgcgggtgttttaattagttttcgtgagcgaatagagagaggggtgttagatggatttttattttttagcgcgtggtgtatgtcgtttacgtcgttgtatagttttagtattcgtaggggttttattttcgcgttttagtcgtcgtagtttcggagttaggtttgtcggttcgtcgttttttttttttttatcgcgtcgtttttttagtttttggtttcgcggcgttttagttttttcgttttttatcgttttaggtttagggttttagagggtttcgcggtttggggattggtaagggtttagaggggaataaaggacggaaaataataaggtttttcgaatgaatggtagttattttgtagtttgatttacgttttatttttttttttggtgttaggggttttgattggaaaagaaatttagagtttagtaaaggggagaaaattgttttggtttttaagtgaattaatattggttagaagttagaaaaaaattattttttagataagttgtttttttgttatttagaagtttgaatatttaaatattttttttatagtgtgttttgttttttgtttgttttgggttaatagagagaaattagattagttttttttttagagaagattttagaattataagtaaggatataagtttattcgtagtagagaaagttttgtgtgcgtgttgataatatagaggatgtttgttgtgtttattagtggggttaattatgttttagtttggaaattatatttatatagaatatatagtgaatattatgtaggattatttatgggtttttaagtgttatggttttgattttttaggatgatttagtaattaattgttagaggtttatgttgacgaaaaaagttaaatttcgtaaaatgtttgaagaggtttattttgagtataaggtgaggatcgtgatttatgatataattttatagggttttgataatatgtatttaaggtggttgggttatagtttgggattatatggttttagggagatataaggatattaattggtatatggaaggtgtatttagtttggtttataaagatgggataatttaaaaaggggaaggattttaggttataggtggatttaaagattttttgattggtagttggttgaaagagttaagttgtgatttaaagatttggaattaatagaaaggaatgtgtttgggttaagataaggtggagattaaggtttttattatgtagacgaagttttatacgtaataggttttagagagaataattggtaaatgttttttattatgtgtaaaaagatgttagatttttagttaaatattttttggattaggaaaagatttggaaagggaaagggagtttttatagaatgtagattttttttataagagatggttgtgtagggttattttaaaaagtgttaaagaaatttattttagggtaaaatgttttgatttagggtttgttattttttatgtgatgttatattagagttatgttggaattttggtattttattgttaagaagagtttgttatgtcggtatgaagattttttgttttaataataatattggttagttgtgtttgaattttaaagagaggaaagtataatgaggtatgtttgattttttttttttagtatggtttgaattagttttttaagtttttttggaattcgtttggtggaggtgtttaattagttagttggggggagtttagaaattttgtggggggagcggtgtttatagttaattataaataaaaataatgtatttatatggaggatagaaaatgttttcgttgtgaagtgtttttttttttgtttttaatattgttataggtttttgttagggggaatttgggggtattatttgtaataataataattgatttgttagaaatgttgtatgtttgttaatgtaatgttgttaataaataaaagtataattattgtatttaaattataatatttattggttttttttgatgtggtttatgaaattaattttttaaattgtatatgtgtattggttacgtgttttgttttttgttagttatttttagataagaagaggtgtatggtagaaagatattagataatttagttttagttttggcgttgttagttaattgattgtgtgattttgagatgattttggtttttttatttgtaagataaagtagaagggaatagaaagagatggattgttgagggtgttttagttttaagaaatgaatttatggttgaatttaaattagaaaaaatgagatttgatttggtaacgtgttaattatttattgaatttgaaatatgtagaaagaagatttgttatttgttttaagtaaatgtatttttaaattaatttagtttatagaaattatgtatatattgatatatgtataatgtatgaagtaaattttttaaatatttattatatatagtattagaaataaatattagtatataaaatgtaaagggaattatatagttatagtgatttatatatagttaaaaattaatatattaaataaatttggaatttttagtattcgtgttataaattaaaataaatgtgataaaagattttatttgtaggggagagatagtatagatatatggtagagttaatgaaaaatattaattttttgagaggaaggagttttaaattttttttttatataggttgattataaattgtttattttgatatttaaggatttttacggtatagttttgaatttattttttttttttaatttttttttttttttgaattttgttgtaaatgaaattatttggtgttttttaaatatgttttttagtttatttttttgtttttgtttttttttttttttagaaattttttagatttttttaagatttatattttaagtggaattttttttttagatttttagtttaaaatattttgatatattgtaatttttaggttttttttattttttgaaatatagattatttttgtatttgttatttaatttttttagttattttagtttaattgttattttatatgtgttatatttttatgtattattttttttttgaggtttatttcgtgataattattttaagaatgaaaattttttttataattataatttataattatttttatggaagtatttgtagatattaggttttttgggattatgtatgtaaatgttttttaattattggtataaattatatgatttggtggaagagtgggagggttggtggaggtggtataatagggagtagttgaggagaaaagtgaggtgagtagaatgaaagtaaatattgattatttttttcgaaagtaaatttcgaaggtttataagagagaagaaaaattttttagttttataattttttataaagttatttttaatgatatgtataatattatttatattttaattagagaaattagatatatttttaaaaaagtaagtaaatattaaaattggaatgttagtatatttattatattttttttaaaagtagaaaatgcgtttttttaaaaaaaaaatatattaattaatatttggaaaataaaggtatatataaagtatattagaaataattaaggggtatattataatattaaggattatagtaaaagagtaatagtatatatttaattattgaaggtattgggtttggaatttaatgatatttttattttttatttttatgtgtttttttattgattattaatatttaattaaatgaaataaagttttttaagtgttgaaaatgtttttttaattatttttgaattttcgtgatttaggttatttttttttttagtaaaatatgatgtggatttttatataggttcgtttatagtttgaggatattttgtttatgttaattttagttatgaataagttgtattttggttttatattaaaaaagaaggtttttatgaattgaatggaaaaagaaaaagttatatgagaagaaattgattataagaaatgtttttaagagagtaaattttataaatttgaattggaaagattaatagagtttatttattatttttgagtttttatttatttgagaatgttttttattatttttttgatttatgggtaataagttttagtttgtaaattgttaatgaaatgttttatggtgaatagttggaattattagaaaatttttttttatagttttttaaattttagttttttttagatttgttttttgtattgattttaaagaattattttttttttggttgggtattgtggtttatgtttgtaattttagtattttgggaggtagaggcgggtggattatttgaggttaggagtttaagattagtttggttaatatggcgaaatttatttttattataaatataaaaattagtcggttgggggttgggtgaggtggtttatatttgtaattttagtatttgggaggtagaggcgggtggattatttgatgttaggagttcgagattagtttgattaatatggtgaaatttcgtttttattaaaaatataaaaattagtggtttatggtggtgtatgtttgtaatttttgtttttcgggaggttgaggtaggagaattattgaatttgggaggtagaggttgtagtgagttaaaattgtgttattgtattttagtttggtcgataagagtgaaattttattttaaaaaaatatatatatatttttttttttttataatgatttgttttgtggttaagaatgtaagttttagagttatagtgtagataggaagtatacgtttgttgttgtttttttttagttaggtgacgtggagaaagttattatatttttttttgagttaaagtgtatttttaaaatgtataaataataggatatgtagttgttatgaagattaaaagtttttagttcggtgtttagtataatataaataaatgtatgttaaataaagagtgtttgtgtaatgatattttttaagtgatgtatttttagttttgtcggttatgaattattatttggtatgatttagatttttcgtattagttatagtttagtttggtgatatttattttaggagttaatattgtatgaaataaattgaatatagattagtatatggtagagcgaattag

SEQ ID NO: 25 - DNA, 5535 bp, Artificial Sequence
  chemically treated genomic DNA (Homo sapiens)
gttatttcgggtttcgggcgttataaatagagttcgtcgagtcgagtcgtttttttttattcgggtttttttgcgttttcggtttcgtcgcgatcgtcgggtcgcgcgttatcgcggttaagtttagaggcgggcggggacgttagtttggttattgcgtttttcggcggtgttcgtttttagagttttcggtcgggttgtttttcgtttttcgtttaggttttttttggcggaattgtcggtgagggtttcgtttttatagttttcgtttttattttattcgtttcggggcgaataaagggttcgaagttgagaggaggggaaggtttgggatgggagtaggggtcgtagttggggagtggtttaaattggagttgcggttgaattttggaatttggggcgtttggaagaaagaggcggaatcggagtttggatacggttgggggattcgaacgcgtaattttgggagtcggggagattcgaattcgggattttaaagtttagttttgaaatagtttaggttgggagtagtggtttattatagtaatttcgatattttgggagggcgagaagggaggatcgtttgagtttaggagttcgagattagtttgggttatagtgagattttatttttttatttttacgtttttataaaaaaaatataaaagttggttaggcgtggtggcgcgcgtttgtggtttagttattcggtaagttgatgtgggaggattatttgagttcgggaggttgaggttgtagtgaggtgtgatcgtattatcgtattttagtttgggtgatagagagagatttcgttttaaaaaaaaaaaaaaaaaagaaagaaagaaagaaaaagaaaaaaagaaaagaaattgagggtagaaatttaatatttaatttgttaatttggaaataacgtagaatttagggtaatttttttttttcgtttttaattaacgttaatcgatttagaattttattgatcgtaggcggcgggttttttatcgtatttttgttttaaggaaatgaatcgggagcggggaatgggtcgttttttagggggttttgttttcgttgggttttggcggagtagagaggtttcggttttttaatatttttaatttttttgtggtgtattatcgtttttttgtagaaaacgtaggagttgtagggttaagtttggtaattttattttttaaggggataattgagttataagtttttttatttgggatgatttatttttagaatcgttgtatggttttggatatagaggtatattttattttttttttttttcgttttttgagacggagtttcgttttgtcgtttaggttagagtgtagtggtgtaatttcggtttattgtaattttcgttttttgggtttaagtaatttttcgttttagtttttcgagtagttgggattataggcgttcgttattacgttcggttaattttttttttgtattttttagtagagataaggttttattattttggttaggttggttttgaatttttgatttcgtgatttattttttatcggttttttaaagtgtcgagattataggcgtgagtattgtgttcggttttttgggggaaaattatatttagtgatgagattattagattgatttttttttttttttattaggcgtgagtattttttttggtttttatattttttaatattgtaagaaataatattaagaatttaggattttggattttttttttttttttttttttttttttcgtttttttgtttgtttgtttgttttgttttgtttgtttttggttttattttgttatttaggttggagtgtagtggtataatcgtagtttattgtagtttttgttttttgggtttaagtaattttttttttttagttttttgagtatttgggattataggtgtatattaatatatatagttttttttttttttttttttttttagatggagtttcgtttttgtcgtttaggttggagtataattgcgtgattttggtttattataatttttatttttcgggtttaagtgatttttttgttttagttttttaaagtgttgggattataggtatgagttattttgtttagttaatttttgtgtttttttgtagagatggggttttgttatgttgttttggttggttttgaattttggagtttaagtaatttgtttattttggttttttaaattgttgggattataggtatgagttatcgtatttagtttagaattttggattttaattgttagggtgaaaagaaaaaggtatttgaggtaagtaaggtttaggataataaatttgggtaatagattaagattttgttttaaaaaaaattttttttttttttttgagatggagttttatttttgttgtttaggttggagtgtaatggtgcgattttagtttatcgtaatttttgtttttagggtttaagtaatttttttgttttagttttttgagtagttgggattataggtatgtgttattatgttcggttaatttttttttttttttttttttttgagatagagtttggttttgttatttaggttggagtttagtggtataatttcggtttattgtagttttcgttttttaggtttaagcgatttttttgttttagttttttgagtagttgggattataggtgtgcgttattacgtttaattaattttagtatttttagtaaagacggggttttattatattggttaggttggttttgaatttttgatttcgtgattcgtttgtttcggttttttaaagtgttgggattataggtgtgagttattgtatcgggattttaattttgtatttttaatagagataggatttttttatgttggttaggttggtttcgaatttttgattttaggtgatttattcgtttaggttttttaaagtgttaggattatagatattagttattatgtttagaaaaaaaaaattaagtaaaatgggaaaatgtagatatagatagatatttatagatgaaagattgatgtgaataaagaaatagagggatgttatgtatatgtaggtaagaataaataaaaagattaatgaatataatagaaatgttagaaatagacgtgtgtgtatgggaatttggtatgtgataaaggtagaattttagaatagtggagaaaagatttatttttggttaatttgagataattggttatattatttataaataacgatttcggtgtatttttaaaaataaattttggttaggtatcgtggtttatgtttgtaattttagtattttgggaggttgaggtgggtagattatttgaggttaagagttcgagattagtagggttaatatggtgaaatttcgtttttattaaaaatataaaagttagtttgtaattttagttatttgggaggttgaggtaggagaattgtttgaatgtgggtggcggaggttgtagtgagtttagattgttttattgtattttagtttaggtaataagagtaaaattttattttaaaaaataataaataaataaataaattttatatagattaaagttagatgatttgtttattttaggttattattgtttgggatcgtgtttgtgttttttattgaattgtaagttttgggaggataatacggggtttttattttttacgtagataaaagaaatgatagaatatattattatagtcgtgtattgtaattttagtattttgggaggttataaagtgattttaggattagttgaggttaggagtttgagattagtttggttaatatggtgaaatttcgtttttattaaaaatataaaaaaaaaaaaaaaaaaaaaaaattagtcgggtatggtggtatatgtttgtaattttagttattaaggaggtaggagaatcgtttgaattcgggagggggaggtgtagtgaattgagatcgcgttattgtattttagtttgggtaataagagcgaaatttcgtttcgaaaaaaaaaaaaaaaagaaaaaaaagaatttattattatgattttgggttatggtagggtttttaatatattaaaagtaaaagttagaacggaatagattgataaatagttgcgtataaatataaataatttttgtgttaaaaataattaaagttaaagtttaaagtagaaattaggaggaaatgtttgtaatatgggtaattaaggattagaattagaatttataaagtatttttagaaattaatagtaataaaaaagttatataatttattttaaaaatggataaggaatatgagtaagtaatttatagaagataaaatttataagattaatatttttataaaaaatattttatttttttagtaattagagagttgtaagttagaatagtgtgatattatttttttaggaagtgattaatattaatttattagttaggtttttgtttagatgtttttttttttaggaagttttttcggatttcggggttgagttaggcgttttttttgatttttattttacggttttttcgggattttttattttagatttgtttattttgggttagtattgggaacgtgtttgtgttttttattgaatcgtaagtttcgggaggataatacggggttgtcgttggttattgttgtgttattagtacggattcgtataggatcgggaagagaggaagcgcgtggggggaataggtgtggaataaatgaatgaatgaggaaattgaagttaagttaatgtttgagttggatttaaatttaagtttttttttattgagaggagggattaagttggattttttgcgatttgttttttattgagttttgttaggattttgggtatatagaagcgtttagtaagggttttgaaatttaatagtttgggagttagatttttaggttatatttttttttttttacgattttcgcggttttttagaattatagagagttgtatagagatcgttttgttttatgttttatttttttggggagcggggttagagaggtcggaagtgttgcgagttttgggttacgttggtcgtgttggtagtgggtcgtttcgatttttttgtagttttttttttgaggttttaagattagtaggtgaggtttcgcggcgttgaaatcgtgaggttcggattataggtgcgggaggcggagattgcgggtggagattggcgtcgcggaagttaattattgtcgagtttgagagatggataaggttaggcgtggggagggcgtttagatgttagtttcgggggtcggacgaacggaaggcgggggatggtggggacggagttaatagaattcggtgggggcgaggggcggagcgatgggatttgtggatttgtaaggggcggggcgagtcgaaggtggaggttaaaggggcgtggcgttatagagtttttagcgttgggtgttggggatttgacgttatggagttttcggagttttgtgggggacggttgtgagtggggggtttttgttgcgggatgagaacgtagacgttagtggtttattcgtttttggtatttttttttttagg

SEQ ID NO: 26 - DNA, 5535 bp, Artificial Sequence
  chemically treated genomic DNA (Homo sapiens)
tttgaaagggaaggtgttaggagcgagtgagttattggcgtttacgtttttatttcgtagtaggaattttttatttatagtcgttttttataaaatttcgagagttttatagcgttaggtttttaatatttagcgttagaggttttgtaacgttacgtttttttgatttttattttcggttcgtttcgttttttataggtttataagttttatcgtttcgtttttcgtttttatcggattttattggtttcgtttttattatttttcgtttttcgttcgttcggttttcgaggttagtatttggacgttttttttacgtttggttttgtttattttttagattcggtaatgattggttttcgcggcgttaatttttattcgtagttttcgtttttcgtatttgtggttcgggttttacggttttagcgtcgcgaggttttatttgttggttttggagttttaagggaaagattgtagagggatcgaggcggtttattgttagtacggttagcgtggtttagggttcgtagtattttcggtttttttggtttcgttttttaggagagtagagtatagagtagggcgatttttgtataattttttatggttttggaggatcgcggaggtcgtgggaggagagagatgtggtttgaggatttggtttttaaattgttaagttttaaagtttttattgagcgtttttgtgtgtttagaattttggtagggtttagtggagaatagatcgtaggagatttaatttggtttttttttttagtaaggagagatttaagtttgaatttaatttagatattgatttggttttagtttttttatttatttatttattttatatttattttttttacgcgtttttttttttttcggttttgtgcgagttcgtgttggtgatatagtagtgattaacgatagtttcgtgttgttttttcggagtttacggtttagtaagggatatagatacgtttttagtgttgatttagaatgggtaggtttgggatgggagatttcgggagagtcgtgggatgggggttagggggagcgtttgatttagtttcggagttcggaagggttttttggaggaagggatatttgagtaggggtttggttgatgagttagtattagttattttttgaaaggatagtattatattgttttaatttgtagttttttgattattaaggaaatggaatgttttttgtgaaagtattggttttgtaaattttgttttttgtgaattgtttgtttatattttttgtttatttttaaaatgggttgtatggtttttttattattattaatttttaggggtattttatggattttgattttaatttttagttatttatattgtaaatatttttttttagtttttattttgggttttaattttagttatttttggtatagaagttatttgtgtttatgcgtaattatttattaatttgtttcgttttgatttttgtttttggtgtgttaagagttttgttataatttagggttataatgataaattttttttttttttttttttttttttttcgagacggagtttcgtttttattatttaggttggagtgtaatggcgcgattttagtttattgtatttttttttttcgggtttaagcgatttttttgtttttttagtagttgggattataggtatgtgttattatgttcggttaattttttttttttttttttttttttgtatttttagtagagacggggttttattatgttggttaggttggttttaaatttttgattttagttgattttgaggttattttgtgattttttaaagtgttgggattatagtgtacggttataatgatatattttattattttttttatttacgtaaaagataaaagtttcgtgttgtttttttagagtttatagtttagtgagggatatagatacggttttaaatagtaatgatttagaatgagtaggttatttggttttaatttatgtaagatttatttatttatttattattttttgagatggagttttgtttttgttgtttaggttggagtgtaatggagtaatttaggtttattgtaattttcgttatttatatttaagtagtttttttgttttagttttttaagtagttgggattataggttaatttttgtatttttagtagagacggagttttattatgttggttttgttggtttcgaatttttgattttaagtgatttgtttattttagttttttaaagtgttgggattataagtatgagttacggtgtttggttaagatttatttttgaaagtgtatcgaggtcgttgtttatgagtgatgtaattaattgttttaagttgattaaaggtagattttttttttattgttttgaaattttatttttattatatattaaatttttatatatatacgtttatttttgatatttttgttatgtttattgatttttttatttatttttgtttgtatgtatatgatatttttttgtttttttgtttatattagttttttatttatgggtgtttatttgtgtttatatttttttattttatttaattttttttttttgggtatggtggttaatgtttgtaattttagtattttgggaggtttaggcgggtggattatttgaggttaggagttcgagattagtttgattaatatggagaaattttatttttattaaaaatataaaattagagtttcggtgtagtggtttatatttgtaattttagtattttgggaggtcgagataggcggattacgaggttaggagtttaagattagtttggttaatatggtgaaatttcgtttttattaaaaatattaaaattagttgggcgtggtagcgtatatttgtagttttagttatttaggaggttgaggtagaagaatcgtttgaatttgggaggcggaggttgtagtgagtcgagattgtgttattggattttagtttgggtgatagagttagattttgttttaaaaaaaaaaaaaaaaaaaaaaattagtcgggtatggtggtatatgtttgtaattttagttatttaggaggttgaggtaggagaattgtttgaattttggaggtaaaggttgcggtgagttgagatcgtattattgtattttagtttgggtaataagagtgaaattttattttaaaaaaaaaaaaaaaattttttttgagataaggttttgatttattgtttagatttattgttttgaattttgtttattttaaatgtttttttttttttattttaataattgaaatttagaattttaggttgggtgcggtggtttatgtttataattttaataatttaggaggttaaggtgggtagattgtttgggttttagagtttaagattagttagggtaatatgataaaattttatttttataaaaaaatataaaaattggttgggtaaggtagtttatgtttgtaattttagtattttggaaagttgaggtaggagaattatttgaattcgggaggtggaagttgtagtgagttaagattacgtaattgtattttagtttgggcgataaaagcgaaattttatttaaaaaaaaaaaaaaaaaaaaaaagttatgtgtgttggtgtgtatttgtagttttagatatttaggaggttgaggagggagaattgtttgagtttaggaggtagaggttgtagtgagttgcgattgtgttattgtattttagtttgggtgatagagtgagattaaaaataaataaaataaaataaataaataaataaaaaaacgaaagaaaagaaaggaaagaaaaaggaaatttagaattttaggtttttagtattgttttttgtaatgttagaagatataggggttaggagaggtgtttacgtttagtaggaaggaaggagaattagtttaatagttttattattaggtataatttttttttaggaggtcgggtatagtgtttacgtttgtaatttcggtattttgggaggtcgatggaaggtggattacgaggttaggagtttaaaattagtttggttaagatgatgaaattttgtttttattaaaaaatataaaaaaaaaattagtcgggcgtggtggcggacgtttgtaattttagttattcgggaggttgagacggagaattgtttgaatttaggaggcggaggttgtagtgagtcgagattatattattgtattttagtttgggcgatagagcgagatttcgttttaaaaaacgaaaaaaagaaaaaatgaaatatgtttttgtatttaagattatatagcgattttagaagtaggttattttaagtagaagggtttgtgatttagttatttttttggggaatggaattgttagatttaattttgtaatttttgcgttttttgtaagggggcgatggtgtattataagaggattggaagtgttggggagtcggggtttttttgtttcgttagaatttagcgggggtaggattttttagaaggcggtttatttttcgttttcgatttatttttttgaagtagaagtgcggtaaagggttcgtcgtttgcgattagtggaattttgaatcggttaacgttagttaagagcgaggggaaaaaattgttttgggttttacgttatttttaagttggtaagttggatgttggatttttatttttagtttttttttttttttttttttttttttttttttttttttttttttttttttttgagacggagtttttttttgttatttagattagagtgcggtggtgcgattatattttattgtagttttaatttttcgggtttagatgatttttttatattagtttatcgagtagttggattataggcgcgcgttattacgtttggttaatttttgtattttttttgtagaggcgtgggggtgggggggtggggttttattatagtttaggttggtttcgaatttttgggtttaagcgatttttttttttcgtttttttaaagtgtcgggattattgtagtgagttattgtttttagtttaagttgttttaaaattaaattttggaatttcggattcgaattttttcggtttttagagttgcgcgttcgaattttttagtcgtatttaagtttcgatttcgttttttttttttaaacgttttaagttttagaatttagtcgtaattttagtttgggttattttttagttacggtttttgtttttattttaaatttttttttttttttaatttcgagttttttgttcgtttcggaacgggtggggtggggacggagattgtaaggacgggatttttatcgataatttcgttaaaggggatttgaacggggggcggagagtagttcggtcgaaggttttggaagcgggtatcgtcggggggcgtagtgattaggttggcgttttcgttcgtttttaaatttagtcgcggtgacgcgcggttcggcgatcgcggcggggtcggggacgtaggggggttcgagtggaggggggcggttcggttcggcgagttttatttatagcgttcggagttcgaaatagt

SEQ ID NO: 27 - DNA, 11049 bp, Artificial Sequence
  chemically treated genomic DNA (Homo sapiens)
tgtttgaagtgagtattaaatattttagaagtgtgaattttatgtatttgagtttttttagttgttgttggttttttttttgttgttaatttgtgatttataaatgattaggattttttgttttttaattttagggttttgttttaggatttaaattagtaatttggtgattataaggtgttgaatgtgttggtaattatatcgtaatatattttaaggaaaaggtttagatttttatttttaaaatatttttattttttttttgaattttatattcgtttgtttattcgtatatgtttagtttatagaaggggatatatattatgaaatggttatttttttgaagagaatattttgtttgaaatgtaaaggattgaaagagatttgtaggttgttgattttgttattttatattggaatttttaaaaagattttattaaataaagttttgttttttatttttaattatatgaatgtttttaaattttgttttaggtagaaggtattattgtgtttttgaagtatatgataatttgttaattttgtttaattggtatattgtaagaaattattttgagttttttataattaatgaaataatatgtattatgatgattgtaattttagatttttaatttaataggaaatagaaaatttgatttttttattagtttgaattaaatgaagttgttatttttgtaggttaaaaatggttgaatattagtaattttatatagtttaattgaatattttagagaagacgtaggtaggaagaattaagaggaaaggagaaaaatgtaaaataaaataagaaattaaaggatagggagatatttagaaaaataggatgagttatttagattattgattataattaatttttataaaagttttgatttgttttaagtttggtttttaagtttggttttttagttattaagagtataatgaggtttgagtttagtgagattatttttttcgtagaagttgtaagtaagagttattgtatattttttttagaagattagtaaaatttttttgatatttgattttttggttagtttttaggaattttatagatatagtgaaagtttaaatattggttttgtatttataagttatattatttatagtgatataggtaagttaaggttaattttttttttgtgtttatttttttattagtaaagtgggggtaatagtatttattttataaatgaatttgaagaataagttaatatatgtagtgtttagaatagtgttttgtagataggaagtgttatttaagagtttgttattattttaaaagatgtgaattttattatttagagtttttagagagagttttttagatagtattttaaggagttaattttttttaaattatatatgtattttttagttgttgtttttttaaaagaatattttatatttaagaatgttgttttatttttttgagatagagtttcgttttattgttaaggttggagtgtagtggtgttttttgtaattttcgtttttcgggtttaagtggtttttttgttttagtttttcgagtagttgggattataggtatgtattattatgttcggttaatttttgtatttttagtagagattgggttttattatgttggttagggtggtttcgagttttcggttttaagtgatttgtttgtttcggttttttaaagtgttgggattataggcgtgagttattatgtttagtttttgttttggttttaaaagtatttataatatttaaatgtttatgttggttatttatttttatttagtttataggtagaaaaaaaaaagtttatttagattaaattttgtagtaatttttttttttattgttattattgttaaagaattgtgtgttattattaggttaagttggtgtagtatttaaaatatttgttaatttgtttttttttagattggaggggtttaggtagtttttttaggatttattatattttgtattttaattttattaataatatttttattttttttgtattagcgatttatttaataaattaaattatatattattattaggttagtttttaaatagtttagtagtaataagaataataagatgttggtcgtattttaattttattggtagaaattgagggttttattggtgaagaaatttgtttaggattatagtgttttagttttttagggttattataataaaatattatagatagggtggcgtaaataatagaaatttgtttttttatggttttggaaattagaagtttaggagtaggtaggtttggttttttttgaggtttgttttttttatttgtagagggtcgtttttttattgtgtttttataaggttttttttttgtgtttattatttttggagtttttttttgtggtttaattttttttttttataaagatattagttaaattggatttagggtttattttaatggtttcgttttaatttaattatttttaaacgttgtgtttttagatagttatattttgaggtatttaggtttttatagatgaattttggaggatataatttagattataatataaggtaatatatggtttagatgagatttgaatgaatgattagtttaatttttaagtagatttttttagtagattgtaaggtgtattggagagttttagattagaggtttaagaggttatttaggtaatatttatagaattgttaagtgttaggattgggggatgtagtagttacgaaaatcgtttttcgttttagtaagtttatagtttattatggggaagagataaatattgaataggtagttatattatttttagtaaaataataattgggaatagtttttggggattattttatatatggaggaaatgtaaaaaatattttgttaggattatttttgtagtaaattagatgtgattaggttaattaaatatggttattgtgaattattttattgagtatagaagtggttttgttaaaaatggatttttttacggagtacggtggtttatgtttgtaattttagtattttgggagattgaggtaggaggattgtttgagattagtttgggtaataaagtaagattttgttttaaaaaaaaaaaaattagggcgtggtggtgggggtttgtaattttaattattcgggaggttgaggtaagagtattatttgagtttgagaggtggaagttgtagtaagttgagattgtattattgtattttagtttgggcgatagagtgagattttgttaaaaaaataaaaaataaaaaaataaaaaaaattaatttttcgtatatttttgttataaagaagtttttaaaaaattgtttgtttttttaagttagtttttttattgagtttaaatttcgttttaatttgaataaatatggatgttaatattattttttatagttattagtgttaagtgcgttgtatgtaatattttgaatatttattgaagtttgtaaggttggttttatgttttgattattgatggagatataaattttgaataattgtgattttagggatgttaaatattatagtgaggtacgatgcggggatttgaattttggtttgagggttttagagttgtggttttttttggggttattttgttaattgatttttagttttttttgatttataagtcgcggtattataatttttagatgttgaagaaaattaaattatatgttaaggattaaggtttgtgaatttttaaaatttgggataggttttagttaatttagaaagtttattttgttaacgttaaggacgcgtagttgtgatatagttttaggaagtttagatgatatgtgtttaaggtggttggggtatagattggttttatatattttagggagataggagatattaattaatatatgtaagtatattggttttttttagaaaggtggggataattcggaagtaggaagggtttttaggttataggtagatgagagataaaaggttgtatacgagtttttgataagtttttttaaaggagataattagaatatgtatttattttagtgagtagaaggatgattgattagaatgggaggtaggttttgttttgagtagtttttagtttgattttttttttttgtttagtaattttgggattttaatatttttataggttttaaattttattattttttagttattacgtgttagtatataaataaatagtataaaattaagaaggtatttattttttggttgtttttttacgtgtaaaataatattttgtgttaagtatttttatatacggcggcgtaaaggtagaaatcgatattaaaaaagcgtgtagaaaatagtttttagtttgggtaatatagggagattttatttttataaaaataattcgttaagtatagtggtgcgtatttgcggttttagttatttgagaggttgagatgggaaagttgtttgagttcgggtagtaggagttttaggttgtagtgagttaagaatgcgttattggattttagtatgggcgatagcgtgagattttgttttaaataaaaataaaagttcgttattttattaagaaggcgtttttgtatattgttttaatgtttaacgtttttaggatgttagcgtgacggaagtaagtaattattaaggtattattattggcgttaaattttttattttcggagtgttgtaagcgtagaaaatatacgttatgtgcggaggcggagttttcgttttgcgcgtcgtattagacggaaatcgagcgggtttattttttatgggtttgcggatttattagcgaaggcgggaggtgtcgtagggatattttttggttgttttcgtcgtttgcgtggtttttgtatttcggttttttattagcggcgtagacgtttgggtttaagcgttgggcgaggcgaggttttgttttttttcgttaacggttattttttggatttgtttttttttcgggaggcggtgatagttgttgagacgtgttgtagttagagttttttcgttttaatgcgtttttattagtgtcgttttttattggaaaatcgtggtttttgtattatttgttatttttgttgtgtaggagtagggagggttttttttcggggttttaggcggcggtgtagttcgtcgtagaagaattagagtagaagttgtcggggttcgtttttaggacgtagtcgttttatgggggtttaggggttttggaagttgttggagtgtttcgggcggtaggttagtttcgaagcgttggaagggaagattttggttgttggtatttttaacgtcgcgttgggatttggggtgtagggattcggggttggatttttcgcggggttttgttttgggtatagtggtatttgtaggatgatggttttgggtcggggtcggggtcgttatagaatttttgttattaggttttttaagtatagtcgtttttcggtattttcggggttttggttttagtttttttttcgtatattacgatgtttaagtttttttaatttttttatataatggcgtggtatttgtatataaattatttattttcgtaattttttaaatcgtttttagtttatttgtaatgtcgaatgtaatgtaagtgatttgtaaatagttgttatattgtattttaaaattttttgtagtttttattggtatgttttatttatttatttttttttatcgtaaatatttttgattcgtggtaggttgattgcggaatcgggtgatgaggcgggtcgttttgtttgttttttttagttttgtagttttagcggtttgtgtattttggtttgttattttgtggtagtgttttatgtttttttttgttttagtttttttatttgtaaagtagaggtggtgatagtatttatatataggattggaatgaggaataaagaaattgtttatatgagagaagtttagtgcgattaatatagtaaattttaaagttattattttgttcgggaggttagtaaggagagtagagtagatttcgacgattagttttgtttgagttttgttttatttatgttttttagaggaaggatagtgtggataggtgttttatttattttttaaattgattttttaaggattattgtttttgtatatgtttggttggttttgtttgttattggaattaaattttttttttattagtaaaacgtgatattgtttttgaaatttttatttttttttttgttatgtagttattttttttttttttttgagtatttattttggtttagaatttggtgatattttatattaattttttaaatggggatttatgagtttaggggttcgtgggtttgtggaaagagttttgtaaatgattgcggggggattggggacgggaaatggagtgtaagagtgtgtgggcgtttagtaaaggaatttttgattgtggagttttaattttttagtaggtataaaatttataaataaaacgatattgataagttttaaaatataatgagattattattttttgtaagtgaataatttttaaataaatttgtaattgatttttggtttaaaagtttttatatagggtattttgaattggggaaagttaaaggatttttgttttgttttgttttgttttttgttttttagagtatatgcgttgttgttgtttttaagttgttgtttagtattattgtagtttaaagatttttttagaaataaagggtaaaggttagtttttagtgataagaatttttaaaattttagtaaagatttagattattttatgtagtagtttttgtgaagaattattaaagaggattgtggttaggtttagtggtttacgtttgttattttagtattttgggaggttaaggtaggaggattatttgagtttaggagtttaagattagtttgggtaatatagtgaatttttgtttatatatagttaaaaaattagttggacgtggtggtttgtatttttggttttagttatacggaaggttgaggtaggaagattgtttgggtttaggcggttaaggttgtaatgagtcgtgtttatgtttgtttttgaataaataaataaaaaggattgtgaaagatattttagttatgataattttatatatttataataaattcgtttatgttaaaggagtatatttgattatttgttttataatcggttttgttttattttatttttacgggaatttagatatttgaaattatttagattttattgtattgtttgttaatgataaatttattcgttattatattagttttataatttatttttgtatttttatattaaattgtttggtttttaaattatttatatagtttagtgttttatttatatagtttaaatgtttgtgttaaataatgtagaagtaagttaaatttttgttttttatagattttaatgtttgtaatatgcgtttaagtgtattagtaagatattattatttttttaggttatgtatattaatggagatttttaagttatttaattaaagaattaaagaaatttattttttgtattgaaatgttattggtttttgggttttatatcgaaagtgatttttggttttgttgtagattttaatttttttgttcgtagaaatttaattttgcgtatataaatttattgaaattagataagttaaattatataaatatttttagattgttttattttttatattttttgtttaataatttatgtgaatatttttaggtcgtttaattttatatattttatttttaagaatttaagttaaaatttttaattttagttgagaattggtattatttgtagttaattgaaaaataaaaaataaaagaagttttattttagtttttatgatttagaattttaggtttatggggtttaataattcgtatgttttagaagttttatattttattttaatggatagtagggatgagagttattgatttgaaattagatttttttattgaagttaaagtttaaagtagtgggttaagtagaaattaatttaattttatgtaatagtgagttttatggtttttttagattatatttgtagtaagtagaaatatcgatttaatataagatagatgtatattaatattaagttttatttttgagatgtattttttattcgattttttttcgtggtttttattattattgtttgcgttaatttgggttattgtaatttattttagaattggtttttttataatttgttttttatatgtttattaaagttatttttaaattatgttttagaaattttttagtggtcgtattattttttgttattttttttgttttgttgtattggttttttggagatagggatcgtttttgttttgtttatggttgaattgtttggtgtatatttttagggttttggatatgtttggtttatggtattgttaaatattatagaaataagtatagtagtagtttgttttttattaggtattttgttatatagtgttttgtaaattaattgttgatggatttatatttttttttatgttagtaaaagttaggtagtgtatatttatttaaatattaaattgtttaatttatttaatagtagatatttattgtgtataagagtttttgtgaaagggagtgtagtgtataaattgttcgggtaagttatggagtatataggttgggttttttttttgttagattataaattttatagggttaatattgtgttttgtttagtgtattggatatgttagtgtatagaaaaaatgttgttatataataaaaatagaaataacgtgataggtggtttttttaatgttttttttttatgttagaaatttatttgtaaatattagtattagtttaggtttttttttgttttttttttttttttgtttttttttgagatagagtttttttttgttacgtaggttcgagtgtagtggcgtgattttggtttattgtaattttcgttttttaggtttaatcgatttttttgttttagttttataggtatacgttattatgtttggttaatttttgtatttttagtagagataggattttattattttggttaggatggtttcgattttttgattttaggtggtttgttcgttttggttttttaaagtgttgggattataagtgtgagttatcgtattcggttttaatatattttttaaataggaatgtatataaggaggatgtttttatttagattgaggaggggatttttggattgagattttagagtaggagagaattaggcggagagagggagaaattgttttaggtagaggaagtagtatgtgagaagaatttggaggtaggaaggagtttagtgatttttgggtttgaggaaagtttagtagtaggaagtgagtagaggttagattatttaaggttttttagattaggagaagaagttttagatagtattttgaaggtagtgggaagttttggagggtttttattaaagatacgttggtgaaatttagtatatatttttaagatatattagaagatagaattgatagatttggtaatagttataggtggtgatgtttagtattttggtttaggtgaatggtagggatatttattgagatgggggtatgagtagttgagtggagaagatatggagtttagttttgattatgttaagtttgaaatgtttatgaggtatggggtagagacgttatttgggttttttgttttggggttaggagcgtgttttgggttagatatatatatggagttagggcgtggtgtatgtggaggggagtggaggttgatagtttagataggaggaaagaagagggtttgagaaagattattgatgaagtgaatattttaatagtgttataggagttggtaaagagtttgagagtaggaaaattagtagagcgcggtgttatttttttttttggataaatataatattttttgagaagtattttttagaaaagtttaaaaatataagaaaattttaagatgaaaatataagttatttttagttttagtagatataatatttattttaatattttggtatgtgaattagttttttatatttaatatatatattgtattagaaaatggagttatattttatatggttttatagtttgttttattatttttaataatatttaatgattattttttttattatatatgtttttgtaatttttatttttaagggttttttggtattttagtaaataggtttgttataattagttttttttttttgagacggagttttgttttgttattaggttggagtgtagtggcgcgatttcggtttattgtaatttttgttttttgggtttaagcgatttttttgttttagttttttgagtagttgggattataggtgcgtattattatgtttagttaatttttgtatttttagtagagatggggttttattatgttggttaggatggtttcgattttttgatttcgtgatttatttgtttcggttttttaaagtgttgggattataggtgtgagttatcgcgttcggtttatgattagttttttaaaaagatttgttggaaaatttttaagttgatttttatatttttattattataaataagtattttgtaaataatttttattatatatttatgatgattttttgaggattaatgtttggaagtggtaaaatagattgtaaagttttaaaaagttttttttattatgaattgttaaattgttttttagaaaatttgtgttaatttatgaaaattttttagtaattatttatttttttttaaagaagtaattttttgtaatgagattttttaaaaggatatgtttgtttttgtatgattttaaaatgtagtatgtgaataggggtaataagagtttaattaaaagttaattgattttaggtagattttatgagagttaaatgttttttaattttaaatgaatagtgataagtatttagtgtttaacgtttggataatattagttattaggaaattgaagttgtgaggatgaagagaaaaatttcggagttttttttattaataatttttttaga

SEQ ID NO: 28 - DNA, 11049 bp, Artificial Sequence
  chemically treated genomic DNA (Homo sapiens)
tttgggagaattgttaatggaaaaaatttcgggatttttttttttatttttataattttaattttttaataattgatattatttaaacgttgaatattaaatatttattattatttatttaaaattgaaaaatatttagtttttatgggatttatttaaagttagttaatttttagttgaatttttgttatttttatttatatattgtattttaaaattatataaagatagatatatttttttaagaagttttattgtaaagaattgtttttttaaaaaaaaataagtgattgttaaagaatttttatgaattagtataaattttttggaggataatttgataatttatagtgaaaaaaattttttaaaattttgtagtttattttattatttttagatattgatttttagaaaattattatggatatataatgagagttatttatagaatgtttgtttataataatgaaaatataaaaattaatttaaaagttttttagtaggtttttttaaaaaattaattataggtcgggcgcggtggtttatatttgtaattttagtattttgggaggtcgaggtaggtggattacgagattaagagatcgagattattttggttaatatggtgaaattttatttttattaaaaatataaaaattggttgggtatggtggtgcgtatttgtagttttagttatttaggaggttgaggtaggagaatcgtttgaatttaggaggtagaggttgtagtgagtcgagatcgcgttattgtattttagtttggtgatagagtaagatttcgttttaaaaaagaaaaattaattatggtagatttatttgttggaatattaaaaagtttttaaaaatggaagttgtaggagtatgtgtgataaggaagatagttattaaatattattaaagatagtaaaataggttataaaattatataaagtataattttattttttgatatagtatatatgttaaatataaaaaattagtttatatattaaaatattaaagtagatattatgtttgttgagattaaagataatttatatttttattttgaagtttttttatatttttaaatttttttaaaaagtgttttttaaaaaatgttatatttgtttaaaagaaagagtgatatcgcgttttgttggtttttttgtttttagattttttgttagtttttgtaatattgttaaagtatttattttattagtgattttttttaggtttttttttttttttttgtttgaattattaatttttatttttttttatatatattacgttttgattttatgtatatgtttggtttagagtacgtttttgattttagaatagagagtttagatgacgtttttattttatattttatagatattttaaatttaatatgattaaaattgaattttatgttttttttatttagttgtttatgtttttattttagtgaatgtttttgttatttatttgagttagaatgttgggtattattatttatagttattattaggtttattaattttattttttaatgtattttgaaggtatatattagattttattaacgtatttttggtgaaaattttttaaagttttttattgtttttaagatattatttaaaatttttttttttggtttaggaagttttgaatgatttggtttttgtttattttttgttattgggttttttttaaatttagaaattattaagtttttttttgtttttaggttttttttatatgttgttttttttgtttgaaatagttttttttttttttcgtttagtttttttttattttaaggttttagtttaggggttttttttttagtttagatgaagatattttttttgtatatatttttatttaaaaaatatattgaggtcgagtgcggtagtttatatttgtaattttagtattttgggaggttaaggcgggtagattatttgaggttaggagatcgagattattttggttaaaatggtgaaattttgtttttattaaaaatataaaaattagttaggtatggtggcgtgtgtttataaggttgaggtaggagaatcgattgaatttgggaggcgaaggttgtagtgagttaagattacgttattgtattcgagtttgcgtaatagagggagattttgttttaaaaaaaaataaaaagaaaaaaaaaatagagagaaatttggattgatgttaatatttgtaggtaaatttttaatataggaaaagaatattgaaggggttatttattacgttatttttgtttttattatgtggtagtattttttttatgtattggtatatttagtgtattgaataaaatatagtattggttttatggagtttataatttagtagggaaaaaatttagtttgtgtgttttatggtttgttcgggtaatttgtgtattgtatttttttttatagggatttttatatataataaatatttgttattaaataagttgaatagtttagtatttaaatgaatgtatattgtttaatttttattaatataaaaaaaaatgtaggtttattaataattaatttataaaatattatgtaataaaatatttagtggaaagtaagttattgttatgtttatttttataatatttagtaatattatgggttaggtatatttaagattttagggatatatattaaataatttagttatgaataaaatagagacggtttttatttttaggaagttagtgtagtaggataaaaggaatggtaggaggtgatacggttattgggaagtttttagaatatgatttaaggataattttgatgaatatgtgaagaatagattataaggaaattagttttaaaatgagttataatagtttaagttaacgtagatagtagtggtggagattacgagaagagatcggataaaagatatattttagaggtagaatttggtgttgatgtgtatttgttttgtattagatcgatgtttttgtttgttataagtatagtttggaaaagttatgaagtttattattatataggattaaattagtttttatttggtttattattttaaattttaattttagtgaggaaatttagttttagattagtggtttttatttttgttatttattagaataggatatgaagtttttgaaatatacggattattaaattttatgggtttaaaattttaaattatagagattgaggtaggattttttttattttttattttttaattaattataggtaatgttaatttttagttagggttgagaattttggtttgaatttttagagatgaaatatgtaaaattagacgatttgaaaatatttatataaattgttagataagaaatatgaaaaatgagataatttgaaaatatttgtataatttgatttgtttaattttagtaagtttatatacgtaaaattaaatttttgcggatagaaaagttaaaatttgtagtaaagttaaaaattattttcggtataagatttaaagattaataatattttaatataaaaaataagtttttttagttttttagttaggtgatttaaaaatttttattagtatatatagtttaaagagatggtaatattttgttaatatatttaaacgtatattataaatattaaaatttataagagataaaagtttaatttatttttgtattatttgatatagatatttagattgtataaataagatattaagttatatagatggtttaaagattaaataatttagtatagagatataagagtaaattatgaaattagtataataacgggtaagtttgttattaataaataatataataaaatttaaataattttaggtgtttgaattttcgtgaaaatgaaataaagtaaaatcgattgtagaataagtaattagatatatttttttgatataaacgagtttattataaatatatgaggttgttatgattagaatgttttttatagttttttttatttatttatttagagatagatatgaatacggtttattgtagttttgatcgtttgggtttaagtaatttttttgttttagtttttcgtgtagttgggattaaaggtgtaggttattacgtttagttaattttttgattgtgtgtagataggggtttattatgttgtttaggttggttttgaatttttgggtttaaatgatttttttgttttgattttttaaagtgttgggatgataggcgtaagttattgagtttggttatagttttttttagtaattttttataagggttgttatataaaatgatttaaatttttgttgaagttttaagggtttttgttattgaaaattaatttttattttttatttttgagaaaatttttagattgtaatgatattaagtaatagtttgagggtagtaatagcgtatgtgttttaaaaaataaaaaataaaataaaataaaataaaaattttttggttttttttaatttaaagtattttgtataaaaatttttaagttaaaaattaattatagatttatttaaagattatttatttgtaaaaaatgataattttattatgttttaaaatttattaatgtcgttttatttataagttttgtatttattgaagaattagggttttatagttagggatttttttgttgaacgtttatatatttttgtattttatttttcgtttttaattttttcgtaattatttataggattttttttataagtttacgagtttttagatttatagatttttatttaggaaattggtgtaaggtattattagattttgagttagaatagatatttaaaaaaaaaaaaaaaatgattatataataaagaaaaagataaaaattttaaaagtagtattacgttttgttaatgaaaaaagaatttaattttaatgataaataaaattagttaaatatgtatagaaataatagtttttaaaaagttaatttaaaaaatgggtaaaatatttgtttatattattttttttttaagaaatataaatggggtaagatttaagtaaaattaatcgtcgaagtttattttgttttttttattgatttttcggataggataataattttaagatttattgtattaatcgtattaaattttttttatgtaggtaatttttttattttttattttaattttgtgtgtagatattattattatttttattttgtagatgagagaattaaggtagagaggaatataaagtattgttataaagtgataaattaggatgtataggtcgttaagattgtaaagttggggaaagtagatagggcggttcgttttattattcgatttcgtaattaatttattacggattaaaaatatttgcgatggaaaaaaataaataaataaaatatattaataaaaattataaaaaattttaaaatatagtataataattatttatagattatttatattgtattcggtattataagtaagttagaaacgatttaaaagattacggaagtgggtagtttatatgtaaatattacgttattatataagggagttgaaggaatttgaatatcgtggtatacggaggaggggttggaattaaagtttcggggatatcgagggacgattgtatttagaaaatttagtgatagagattttatagcgatttcgatttcgatttaagattattattttgtagatgttattgtgtttaaggtagagtttcgcgaggaatttagtttcgaatttttgtattttaagttttaacgcggcgttaaggatattaatagttaggatttttttttttagcgtttcggggttgatttgtcgttcggagtattttagtagtttttagagtttttggatttttatgaggcggttgcgttttaagagcggatttcgataatttttattttaatttttttacgacggattgtatcgtcgtttaggatttcgggaggaagttttttttgtttttatataataaagatggtaaataatatagaagttacggttttttagtgggggacggtattaatgggagcgtattaaagcggagagattttggttgtaatacgttttagtagttgttatcgtttttcggaagaaagataggtttagagaatggtcgttggcggggaggggtagggtttcgtttcgtttagcgtttaggtttaaacgtttgcgtcgttaatggaagatcggggtgtaagggttacgtaggcgacggaaatagttagaagatgtttttgcgatatttttcgttttcgttggtgggttcgtaaatttatgaaaaatgggttcgttcggttttcgtttaatacgacgcgtagggcggaagtttcgttttcgtatatgacgtatattttttgcgtttgtagtatttcggaagtgagaagtttagcgttagtggtgatgttttggtggttatttgttttcgttacgttggtattttgaaggcgttaagtattaaaataatgtgtaaaagcgtttttttggtggagtaacgggtttttgtttttgtttgagatagggttttacgttgtcgtttatattggagtttagtggcgtatttttagtttattgtagtttggaatttttgttgttcgagtttaagtaatttttttattttagttttttaagtagttgggatcgtaggtgcgtattattatgtttggcgaattatttttgtagaaatgaggtttttttgtgttgtttaggttgggaattattttttatacgtttttttagtatcggtttttatttttgcgtcgtcgtgtgtgaagatatttaatataaagtgttgttttatacgtgaagagataattaaaaggtggatgtttttttggttttgtattatttatttatatgttagtacgtagtaattaaagaataataaaatttaaagtttgtgaaaatgttagggttttaaaattattaagtaaaagggaaaagttaagttgggaattgtttagggtaaaatttgttttttattttagttagttatttttttgtttattgagatagatgtatattttgattgttttttttggaaaggtttattagaaattcgtatgtagttttttgttttttatttatttgtgatttagaagttttttttgttttcgagttgtttttatttttttggaaggaattagtgtatttatatatgttgattgatgttttttgtttttttaaaatgtataaaattaatttgtgttttaattattttgggtatatgttatttggattttttggggttgtgttatagttgcgcgtttttaacgttggtaaaataaattttttaaattaattgagatttgttttaaattttgggggtttataagttttaatttttgatatatagtttagttttttttagtatttaaaagttataatgtcgcggtttgtagattagaaaggattagaaattaattaatagagtaattttagaaaaggttatagttttggaatttttaggttaagatttaaattttcgtatcgtgttttattatggtgtttagtatttttgaagttatagttgtttagaatttgtgtttttattagtaattagggtataaaattaattttgtagattttagtaagtatttaaggtgttatatgtaacgtatttagtattagtaattataaaggatagtattagtatttatatttgtttaaattggaacgaaatttaaatttagtgaaaaggttgatttaagggagtaggtaattttttaaagatttttttataatagaagtatacgggaaattgattttttttatttttttattttttatttttttgatagggttttattttgtcgtttaggttagagtgtagtagtgtagttttagtttattgtaatttttattttttaggtttaagtgatgtttttgttttagtttttcgagtagttgagattataggtttttattattacgttttgatttttttttttttgagatagggttttgttttgttgtttaaattggttttaaataatttttttgttttagttttttaaagtgttggagttatagatatgagttatcgtgtttcgtggagaaatttatttttagtaaaattatttttatgtttaataagatggtttatagtggttatgtttggttgatttagttatatttaatttgttataggaataattttgataaagtgttttttgtattttttttatatgtaaagtaatttttagaaattgtttttagttgttattttattgagagtaatataattgtttgtttagtatttgttttttttttatggtaaattgtaaatttattgaaacgaagaacgattttcgtgattgttatattttttaattttggtatttagtagttttgtaaatattgtttaaatgattttttaagtttttagtttaaagttttttagtgtattttgtagtttgttgaaagaatttgtttggaggttaggttgattatttatttagattttatttgaattatatgttgttttgtgttatggtttgaattgtgttttttaaaatttatttgtggaagtttgagtattttagaatgtgattatttgaagatatagcgtttaaaaatgattaaattgaaacgaggttattaggataggttttaaatttaatttgattggtgtttttgtagaaagaggaaattgggttatagggagagattttagggatgataggtatagaggaaaggttttgtgaggatatagtgagaaggcggttttttgtaggtgaaggagataggttttagaagaaattaaatttgtttgtttttggatttttagtttttagaattatgagaaaataaatttttgttgtttacgttattttgtttgtggtgttttgttatggtagttttgagaaattaagatattgtgattttaggtaggtttttttattaatgaaatttttagtttttgttagtaaaattagaatgcgattaatattttgttgtttttgttgttgttgagttatttaagaattgatttggtaatggtgtataatttagtttgttgagtgaatcgttggtataggaggggtgggagtgttattggtaaagttgagatgtagaatgtgatggattttagaagagttgtttgagtttttttagtttgggagaagataagttggtaagtattttgggtgttgtattaatttggtttaatgatggtatatagttttttaatagtaatagtagtagggaaaggaattgttgtagaatttgatttaaataaatttttttttttttgtttgtgagttgggtaaaaataaatagttaatataggtatttgagtattgtaagtatttttaaaattaaagtaaaggttgggtatggtggtttacgtttgtaattttagtattttgggaggtcgaggtaggtagattatttgaggtcgggagttcgagattattttggttaatatggtgaaatttagtttttattaaaaatataaaaattagtcgggtatggtggtgtatgtttgtaattttagttattcgggaggttgaagtaggagaattatttgaattcgggaggcggaggttgtagagagtattattgtattttagttttggtaatagagcgagattttgttttaaaaaaataaagtaatatttttgaatatgaaatatttttttgaagaaatagtaattaaggggtgtatatgtgatttaaaaggaattagttttttaagatgttatttaaagggttttttttaaagattttgaatagtaaaatttatattttttggaataatagtaagtttttaaatagtattttttatttataaagtattgttttaaatattatatgtattagtttattttttaaatttatttataaagtagatattattatttttattttattaatgaggaaataggtatagaaaaaaaattaattttaatttgtttatattattataggtgatatagtttgtaagtgtagagttagtatttgaatttttattgtatttataggatttttaagagttgattaagaaattaaatattaagggaattttattaattttttaagagaagtatgtagtaatttttgtttatagtttttgcgggaaagataattttattaaatttaaattttattgtgtttttaataattggaaagttaaatttggaagttaaatttagaatagattaagatttttataaaaattgattatggttaatagtttgaataatttattttgtttttttaggtgtttttttattttttaattttttattttattttgtattttttttttttttttttggttttttttatttacgttttttttgaaatatttagttgaattgtatgaaattgttaatatttaattatttttgatttataaagatgataattttatttggtttaagttaataaaagaattaaattttttattttttattaaattagaaatttaaaattatagttattataatgtatattgttttattaattataaaaggtttaagatggttttttataatgtattagttgagtagaattgataaattattatgtattttaaagatataatggtattttttatttaaaataaagtttaaaaatatttatataattaaaagtagaaaataaaattttatttgatgaaatttttttaaaagttttagtatgaagtaataaaattaataatttataaattttttttagttttttgtattttaagtaaaatattttttttagaaaaatgattattttataatatatatttttttttgtaggttaggtatgtacgagtgaataaacggatataaaatttaagaaaaaaatgaaaatattttaaaaataaaaatttgaattttttttttgaggtgtattgcgatatggttattaatatatttagtattttgtaattattaagttattgatttgagttttggaataagattttaaaattaaagaataagagattttagttatttgtgagttataggttggtagtagaagaaaaattaatagtaattagaggagtttaaatatatgaaatttatatttttgaaatatttaatatttattttaaata

SEQ ID NO: 29 - DNA, 11049 bp, Artificial Sequence
  chemically treated genomic DNA (Homo sapiens)
agtgatgttttttgattgagttttttattattttgaatataagagattataatagttaggtaggagtagtatagtttttatttagtttgaagaagttatagaagatggatttttgtttttttattattttttggattaggcgtttttttgtaaaagggaagggagaaatatgttagaggtatttgaattagagtgattttattttgaattggggttgggtgaaataaggttgagatttattgagttgtatttttaagagggtaggtattttaagttataggatgaggtaggaggttggtataagatataggtgataaagattttgttgattaaatagtttgcggtaaagaagttggttaaaatttacgaaaattaagatggtaatgaaagtgatgtttggttatttttatttttttttatatgttaattataatgtattagtatgttaagagatatttttattagtatatgatagtttataaatgttatggtaatattagaaagttattttatatggtttaaaaatgggaagaatttttagttttgggaattatttattttttttttagaaaatttaggaataatttattttttttttagtatataattaagaaataattataagtatttttattaagtagtttaagttgttgttttgtttatggagtagttattttttatttttttatttttttaataaatttgtttttattttattttatggatttgtttcgaatttttttttatttaaggtttaagaattttttcggtatttggatcgggaattttttttggtaatagtttataatggatggttttatatatttattgtttttaagtttgttgatttatttatttaatatatatttaatatgtttttttagtggttgttaatatagttttaaataatatgtttttgttttttttttgatttataatttttataaagtatttattgtgtttttaatatatttaattattttttatgagttttttttatttataaggattagagaattaaatcggttttgttgtattgtcgttatttagaagttttgaaaagtgagagttaatttagatttttgttttgtaggttattgggagaattttttatattgaatacgaaatgtgaaataaaggcgtaaggatgaatatcgttatagttaaataagttaatattagtaaagtatttaagataatgaaattatttttgtaaaaattatattagttagaaaattatgatagtgaaagaggtttgagttaacgtttttattttaatatttattttgttttttttttaattatttttaagttattggggttagttaattttgagagatatttaggttatagtttatatgataatagattttgtttgaaatttaattgtttttgtaaagttaatgggaagttattaggttgtgggggaggagaggagtttgagttttgttaaggcgtagatatgaacgattgttagttattattttggaggttataagatatttaatttttttaattatttttgtaaataatattattgatatggtttggttgtgtttttatttaaattttattttgaattgtagtttttataatttttatatgttgtgggaggaagtcggtgggagataattgaatcgtgagggtggttatttttatgttgttttgatagtgagtttttacgagatttgatggttttataaggggtttttttttttttttattttgtatttttttttgttgttattatgtgaagtaggatatgtttgttttttttgttattatgattgtaagtttttagaggtttttttagttatgtttaattgtgagttaattaaattttttttttttataaattatttagttttgggtatgtttttattagtagtacgagagtagattaatataattattatttgtagttttttgagatatttttttaggttttttgtatgtttgatatttatggttttatttggatcgttaattttatttttatagttttatttagaagtgatttagattgtaggaggatagttttgattttttttatgattttattttagttttaattaattagtagtaagtatttgttatttggttatttttatttttttttttaaattgcgtttgaaaaatttttagtttatgagtttcggattttggattagatgatttgagtatgtattttattttttatttggtatggtcggtttcgtgtttattaagttttttttttattataatgttatggtttttttttatgtagtgggtaggaagaattttttgggtggggtgtttaaaataatgtttagtttagagtaagggttaggaaatggtagggaaaatggattaaaatttaaattaataattattataataatgatattagaaatattggtttgggggtatataggagatgtaagagtttattgttgttagagggtaggggaaagttttagaaaagagaaattttgtttgagtttggaatgggtaagagaattttaagtagagggatttgtttgtaagattatagaagtgatagaataataagtaggggtatgtgggaaaagattaataattgttttttttttaaagttttagtttatagtttgtttatttttgtggtataaatatttttattatggttgattttaagttattaatgtgaagttaataaaggtagagttggtgttatgggttaaattgggtgttttttaaatttatatgttgaatttttaatttttaatgtgattatttggagatagggtttttaggtagtaaatttggttaaatgagattataagggtgagtttttaatttaatacggttgatgttttagaagaaagggaagatagagttttttttttattttatgtaaggatatagtgagaaggtaattatttgtaagttatgaggagagttttttttaaatgagttaaatttgtttgtatttgattttggattttttagtttttagaattatgagaaataaatgtttgttgtttaagttgtttagtttatggtatttgttatggtagtttgagttaaggtagttgggaagaggtgaatagtatgtttgttaggtcgtagaagttaattgtagtatattttttttgggagaagagtaagtagttttttaaattttgagtataggtatttagggagtgaaggatataagtgatgtagaaaaattagatggggtaggagtataaaagggtttggacgatttgttaaataatttgggattttatttaattaaatttttttattaaagattttatttttaaatatagttatattttgaggtttcggggtgggggtggggagtggcggttaggattttagtatatgaattttggggaggggatataattcggtttttaatagttttagttgtgttattttgagttgtttttttgaatttcgtttacgtttttgtaaataataatttttaatttttttttttgagtggattatttttttttgtttaaattttgatataggaagggtttttaaaatagttgtaaagggaattttagttttaaaagttgggatttattatatatttgtttttatttttaagtattgaaattaatgttaattaattgtttttttatttttaatattttatttaagaaatcgttagaatttttttttttttaaaaaaaaaaaaaagtaagttataagtcgggcgtggtggtttatatttgtaattttagaattttaggaggtcgaggcgggtggattatttgaggttaggagttcgcggatagtttggttaatatgacgaaatttcgtttttattaaaaatataaaaattagttgggtatggtggtaggcgtttgtaattttagttattcggtaggttgaggtaggagaatcgtttgaatttgggaggaggaggttgtagtgagtttatatcgtgttattgtattttattttgggcgataagagtaaaatttcgttttaaaaataaaaataaaaataaaataaataaaaaaatttattattattaataaaaataagttatattgtgggttggggtcgttgataggaggaataagatgatgttatggagtattttttagtttttttttcgattttatttttttattgttcgattttaggtttttaagtgaggatagtattttttaggtagtgattcgtagttattgtttttttagaggacgttttgtttcgcggttttggaaagtttatttttttttagtatcgattttgagttgagaagttttgtttggtatagttattttgtatcgtgggttgtttttttttttaggcgaagtttaatttttttttattgttttgaatttttgtgtggatattttttttttttaaacgtattacggtaaaattttcgtttgtttcgaaatttcgtttatttttgagatttgaggacggatattaaacgttggatttaaggtaatgtatatatgtaagtaggttttgtaggtatttatttcgtttaggtgcgcgcgtggcggagggggaatagagaagtaggatagttttttatttttttcgtgtttagtcgtgggagataataagagaggttatagtttggcgattaaaaagtgcggttaatttttttgtttaagttgattttttttgtagggtttaaggttaattgtgaggatttatattcgtatggtatattcgtatttttttttacgtggaaatatgttttaatttttataattgttttgttagtagggtatttttcgttaggggcgaagcgtttttcgtaagttatttagttgatcggtagcggagatagttttttcgttttgttcgtacgtaagtagaaaggcgttgttgagttcgtttttttaaattacgtggttttgttcgtgtttaaaaataaacgttgagttaggcgtatgcgttacgggttttttcgtattagtagaagtcggagtcgttgttgggggcggtgtttatggttgagttgagggcgtaggcgttacggttcgtcgagttgggttttaaggcggttggcggcggtagcgtttttgtttttttgtgggcgttcgcgcggttttgggtgagtgttcgggggtttcggtcgaatgtcgggtagggggtgtcggggtttagtttaggtttttcgggcgggtcgcggtttcgcgttttggtttcgtcgtggtgattgagtttgttagcgaggacgtattgtagcgggttttagggttaagtgttcgttttcggcggttttatttgagatcggaagtagcgttaaggagcgtttatttgaggcggtttgagtttttggtcggttagcgatttagttattttttcgattttgtataaggttttttgcgcgtagggttagttgggttttttttgatttcgattaaaatgttggagttgttattttaaagagagtcgggttagatgtacgttcgacgttttgggcgttgatagagttaaattgataagagtgtgggcggatgaggtaggtcgtttgtaaatgttgttgttacgtgatttttacgtagcgttttaattgttgttattttgtgataggtagttttcgtttttttttttaattttttttattatttttttgttgttttgttttttttaatttattattcgtatagttgtttaggtggtttttggtataaagtaggttatgttattattagtttatttaatagtttttagagttattttattgtattgggagtggaatttatgttcgtgtttttttaggttttgtgtgatttggtttttgtttgtttttttttagaattgtgtttgtgttcgattaattttttaaatgagatttagtttgtttttggttgcgggagttttagtgatgggggaggacggtgaagatattagtgttttagatgattaagttttagaagatattttgtaagatttaggttatgaacggagtttttttttgttttttttaatttaaagttaaaaataaagttaaaaattcggtgttttagtttttttgtatttttataagtgtattagttttttttagttttaaaagttacgtacgttgttgggaggtcgaggtgggtggattattcgaggttaggagttcgagattagttttattaacgtggtgaaattttgtttttattaaatacgaaaaattagtcgggtatgatggtatatgtttgtaattttagttaatcgggaggttaaggtaggagaatcgtttgaattcggaaggcggaggttgtagtgagtttggcggagtttggcggaggttgtattttagtttgggtaatcggagcgaaatttcgttttaaaaaaaaaaaaaattttatacgttgtttttttgtaagacgtttattttattttcgatttgattgatttattagatgttattttattagagaggtttttttgattttatatttatttttataattttaatttggttttttttattttgttagaaagttttgtattttttttttaatagtagttattataattatatttgtgtgtgtgtgtgtgtgtgtgtgtgtatgtgtatatatatatatatagtttttaaatgtttgttttttttatgagattttaagttttttggggataggaattagttaatttagtatattgtttggtgtaattaatttttagtaattatttgttaaatgtatgatttttttttttttttttttttttttttttgagacggagttttgttttgtcgtttaggttggagtgtagtggtgcgatttcgtttattgcggttttcgttttttgggtttaagcgatttttttgttttagtttttcgagtagttgggattataggcgcgcgtttttatgtttagttaatttttgtatttttagtagagacggggttttattatgttggttaggttggtttcgaatttttgatttcgtgattttttcgtttcggttttttaaagtgttgggattataggtatgagttatcgttttcggtaaatgtatgatttattttatttttgaaattttttaatttgataagagttttttggtttttaatttttatttttagaagatttggttttttggttattgttagatattaagtgattttttgaatttttttttttatttttaggttttttttgtttttttgtttgtttgtttttgtttttttaaatttatttagtttggattttgaagttagttgttttagttattttttttagtatttttaatttcgtgatttttttgcgttattatttttgttttgaaaatttttaatagtgatattttttttaggattattgaaggaggagattgtttagttttggagattgttagtagtttatggttttgtagggttggggagatttttaggtaggttttttatagtaattattagtgtttgttttttgttaattttttttttttttgtataggatatttattttagatttttagtttttagttttagtgttaattttgttttttgatttaggaattgtttaatttgttgttttgtgggatattttgtttgtaatttattttagttttttttttttttatttgtaaatttagatttattaggaattttttttttgttagagttcgagaaagatgtgttgtgttttttgtttatttttgtttgcgattttttatttttgttgttttttttggtatatttttttgggttattttttttgtttttttttagttattacgtgttttagttttttttgttttagttttttttttatttttaataaatttattattattttattattgtagttgtttttttgttagaggtaagttttttaaaggataggttatttttttgtggtttttatttttttatttattttttatatattaattatattttaattattatagtttggtttttggttttatcgttttattgaaatttttttattttttcgagatagagttttatttttgttgtttaggttggagttttgcggtgtgattttagtttattgtaatttttgttttttgggtttaagcgattttcgtgttttagtttttcgagtagttgggattataggtatgtattattacgtttggttaatttttgtattttagtagagatggggttttattatgttgggttaggttggttacgaatttaggtgatttattcgttttggttttttaaagtgttgggattataggtgtgagttattaagtttggtttgaaattttttttattaaggtaaatggtgatttattggtatttaaatttatttagtttttttttatttattggacgttttttttttttttttattattagaagttttttttaaatttttttatttttaattttgtttttatattataatattattgttttttgatattattttatagaaatagaaaaatggttatttaatatttttggttgaattggtattttttttttttaaaaagaaatttttatgtgtgtataaataagaaaaatgaaaatagaattgttaattgttagttagtatagatattttgagttggaattttgttttttttgttggaaagtgaggtgagttgagttttttttttgaaaataattagtaggttttaaaagaaggaatttttttattgtgttgtttattttttaatttttttaatgttagttttttcgtattttttaaaatgattttaggtatttgttagagttttgggaattttggaattgtttattttgttgatgtgtttatatgttatttagatttttttttgagtttagatttgtatttttgattgtatgttgtaaatggtattgattatatgtaagttgtttgttagttttgttttttatttgttttttttttgagagttttatttttgtgattgaatttattggtgatttatttgtttagattaaattttttattattttagatttagttttgaattttatttttttttagtagatattgagtattttttatatattagattatgtatggtttatgtgtttaaattttagttttttcgtgatattttttgggttttagatattatatatagttcgttcgatgttcgtgtgattttttgttcgtgtttcgggttagttgatttgttttgttttgttgttaattgatatgttgttgttttagtggatagttattcgggtgtagatgatgttgaattttttgtatttcggtgttttattgttgggtttattttatttaataagggatgagtggggtttattgggggaatttgttatttaatagaaaagttatagtgtttaaagaaattttatttatagttaaataaaaagtaagattgatttttggttatcgttttgttttttaatatatttattagatgtgatagttgtataggtaatatagtgaatatattttttttaaagtagtaggttttgagtatgtggagtataatgtgaatatttttttttatttttttttgtgtttttttttttttattttgatttgtaggtttagtttgtattttgttagattattttgtgtgtaggatagatattttttttagtataagtgtgtttatattatgaatttttttatttaatatggtttttatattagtatatagaatatatttagtagttatattaaattattaaaaatgtgttgtattaaatatttttgtatttgtgtgtgattagttttttggaataaatatttagaattgtttgataaaggttatgtgtttttaatttaatagatattgttaagttgtttttataaggggttttattaatttatatttttagtagtattatgtgaggggggatttttttttttgtttgtattggatttatttattaggttttgaatttttgttaatttgatgggtgagaaattatattgtgtattaaaatggagttttttttttgtttttttttttttttttttttgagattgagttttattttgttgtttatgttggaatgtagtggtgagattttattttattgtaattttcgttttttgggtttaagtgatttttttgttttagtttttcgagtggttgggattataggtgtttattattatatttagttaattattgtatttttagtagagatcgggttttattatgtttgttaggttggttttaaatatttgattttaagtaatttgttcgttttagttttttaaagtgttgggattatagatgtgagttatcgtgtttagtttatttttgagaatattttaattaattttttaaaaaaattttaaatttattttataaggttttgtttttttgtttaggttagagtgtagttgtgtaattatggtttattgtagtttttattttttaggtttaagtgatttttttgttttagttttttgagtaattgggattataggtgtatattattaggtttggttaaggttttaaatttttagtagagataaggttttattattttttttaggttggtttcgaagttttgagttcgttgtgtttttttggttggtttttattttttcgttttggttttttaaagtgttgggattataggattgagttacgtgtttggtttaattaattttttgagtttttgatttgtttaaagtttttatttattggataggtatttagtttaggagtttttagttttagatttatatagaagtttttttttaatatcgttgtttttatgtattatagttgattttgttattatattataaattatttgtgttataatgaaatgaagatgttaatttggaaaatagtagttaaatgattttagttgttttgaagaatattttatggttattattttaggattttggtggttggtttttttagttggttgtttaaatgttttttgttgatgatattgtatttttttttttggttaattttttttatttattattagaatttaagaagatacgttgtttttttttagtaaattaatatttggaaatttgaatttatgtagttggaagattattatttgattttttgagaaattagtttgttttaattataaaatatttaagaattataatgaattttatataacgaaaaggtttataaatttttttttttttagg

SEQ ID NO: 30 - DNA, 11049 bp, Artificial Sequence
  chemically treated genomic DNA (Homo sapiens)
tttaaaaggaaaaaaatttataagttttttcgttatataggatttattgtagtttttaaatattttataattagagtagattgattttttaaaagattaagtaataattttttaattatataaatttaagtttttaagtattaatttattaaaaagggataacgtatttttttgagttttgataataaataagaaaaattaattagaaaaagaaatgtagtattattaataaaggatatttaggtagttagttaagaaagttagttattaaaattttggggtgatggttatggaatattttttaaaatagttgaagttatttggttgttgttttttaagttagtatttttattttattatgatataaatgatttataatatagtggtaagattaattgtaatgtataggaatagcgatgttaggaaagagtttttgtgtgaatttgagattagaaatttttaggttgaatatttatttagtaaataggagttttgaataaattagaagtttagaagattaattaggttaggtacgtggtttagttttgtaattttagtattttgggaggttaaagcgggaggatagagattagttagggaaatatagcgagtttaggatttcgagattagtttgggaaagataatgagattttgtttttattaaaaatttaaaattttagttaggtttggtgatgtgtatttatagttttagttatttaaggggttgaggtaggaggattatttgagtttgggagatggaggttgtagtgagttatgattgtataattgtattttagtttgggtaaaagagtaagattttgtaaaataaatttaaagtttttttaaaagattaattaaaatatttttaaaaataggttgggtacgatggtttatatttgtaattttaatattttgggaggttgaagcgggtagattatttaaggttaggtgtttgagattagtttggtaaatatggtgaaattcgatttttattaaaaatataataattggttgggtatgatggtgagtatttgtaattttagttattcgggaggttgaagtaggagaattatttgaatttaggaggcggaggttgtagtgagatgagattttattattgtattttagtataggtaatagagtgagatttaattttaaaaaaaaaaaaaaaaaaaaataaaaaaaaaattttattttaatatatagtataattttttatttattaggttagtaagaatttaaagtttgatagataaatttaatatagataaggagaaggatttttttttatatagtgttgttgagaatataaattagtaaagttttttgtagggataatttagtaatatttattaaattaaaggtatatgatttttgttaagtaattttaggtatttattttagagaattagttatatataggtgtaagaatgtttagtgtagtatatttttaatagtttaatgtaattattaagtatattttgtatattgatataaaagttatgttaagtgaaaaaatttatggtatgaatatatttatgttgaaaaaagtatttattttgtatatagaatgatttggtaggatataaattaagtttgtaaattaggatggggaagagaaagtatagggaaaaataagggggaatgtttatattgtattttatatatttaggatttgttgttttaaggagaatatatttattatattatttatataattattatatttaataaatatattaaaaagtaaaacgataattaaaaattagttttgttttttgtttaattgtgaataagatttttttgagtattgtaatttttttgttaaatgataagtttttttagtgggttttatttattttttattaagtaaaataagtttagtaataaagtatcgggatataaagaatttagtattatttatattcgagtggttatttattggagtagtagtatgttagttaataatagagtagggtaggttagttagttcgggatacggataagaggttatacgagtatcgagcgaattatatatggtgtttggggtttaagaaatattacggaggaattgagatttgaatatatgggttatgtatggtttgatatataggaggtgtttaatatttgttgaaaggaagtgaggtttagagttaagtttaaaataataaaaagtttggtttggataaatgagttattagtgaatttagttataaaaatgagatttttaaaaaggaagtagataggaagtaggattggtaagtagtttatatgtaattagtattatttgtagtatgtagttagaaatgtaaatttgagtttaagggaaagtttgggtgatatgtggatatattagtagagtgagtagttttagggtttttaaggttttgataggtatttaaggttattttggagggtacgaggaggttaatattggaaaggttaaaaagtgaataatatagtgagaaagtttttttttttggggtttgttgattatttttaagaggaaggtttagtttattttattttttaatagagagagtaggattttagtttagagtgtttgtattagttggtagttaataattttgtttttattttttttatttgtatatatatgaggatttttttttaagaaaaaaggatgttaatttaattaaaaatattaagtaattatttttttatttttgtaaaataatattaaaaagtaatagtattgtagtgtaaagataaggttaaaaataaagaagtttggggaaaatttttaataataaaaaaggaggaagagcgtttagtgaatgagaaaaggttgagtgaatttggatattaatgggttattatttattttggtaaaagaagttttaggttaggtttggtggtttatatttgtaattttagtattttgggaggttaaggcgggtggattatttgagttcgtgattagtttgatttaatatggtgaaattttatttttattaaaatataaaaattagttaggcgtggtggtgtatgtttgtaattttagttattcgggaggttgaggtacgagaatcgtttgaatttaggaggtagaggttgtagtgagttgagattatatcgtagaattttagtttgggtaataagagtgaaattttgtttcgaaaaaataaaaaagttttagtggagcgatagggttaaaaattagattgtagtggttgaaatgtagttggtgtgtaaggagtggatgaggaaatggaggttataagagagtggtttgttttttaaagagtttgtttttggtagggagatagttatagtgataaagtaataatggatttgttgggggtagggagagaattagggtaagaaaaattagagtacgtaatggttggagggagatagaggagataatttagaaaggtgtattaaaagagatagtaaaagtggaaggtcgtaagtagaaatgaataggaggtataatatatttttttcggattttggtagaaggaggatttttgatagatttaaatttgtaggtggaaaggagggaagttgaagtggattatagataaaatattttataaagtagtaagttgggtagtttttgagttaggagataaagttggtattggggttaaagattaagagtttggaataaatgttttgtataagagaaaagggagttgatagggaataaatattgatgattgttgtggaggatttatttgaggatttttttagttttgtaaagttatagattgttaataatttttagggttgaataatttttttttttagtagttttgggggaaatgttattattgagggtttttagagtagaaatggtagcgtaaaagagttacggggttgaagatgttgagaagagtagttgaagtaattgattttagggtttaagttgggtaggtttaaaaaaataaaaataaataaataaaaaaatagaaggggtttggaaatgggagaaagggtttaagaagttatttagtatttggtaatggttagaaaattaagttttttggaagtgagagttggaaattagaaggtttttattaggttaaagaattttagaagtgaaataaattatatatttgtcgggagcggtggtttatgtttgtaattttagtattttgggaggtcgaggcgggaggattacgaggttagaagttcgagattagtttgattaatatagtgaaatttcgtttttattaaaaatgtaaaaattagttgggtatggaggcgcgcgtttgtaattttagttattcgagaggttggggtaggagaatcgtttgaatttaggaggcggaggtcgtagtgagcgagatcgtattattgtattttagtttgggcgatagggtaagatttcgttttaaaaaaaaaaaaaaaaagaaagaaagaaattatatatttaataaatagttattgagagttaattatattaggtaatgtattaggttaattaatttttgtttttaaagagtttagagttttatgggaaaaatagatatttaaaaattatatatatatatatatatatatatatatatatatatatatatatataaatataattgtggtgattgttgttaagaggaaagtataaggttttttgataaaatgagagaaattaaattgaaattgtggaggtagatgtggggttaaggaggtttttttgataaagtgatatttgataagttagttaggtcgaaagtaaagtgaacgttttgtaaggaaataacgtgtgaaattttttttttttttgagacggaatttcgtttcggttgtttaggttggagtgtaattttcgttaggtttcgttaggtttattgtaattttcgtttttcgggtttaagcgatttttttgttttggtttttcgattagttgggattataggtatatgttattatgttcggttaatttttcgtatttagtaaagatagggttttattacgttggtaaggttggtttcgaatttttgatttcgggtgatttatttatttcggttttttaataacgtgcgtaatttttaagattagaaagagttgatgtatttgtgaaaatgtaagaaggttggaatatcgaatttttgattttatttttaattttgagttaagaagagtagagaagggtttcgtttatggtttaagttttgtagagtattttttaaggtttaattatttgggatattagtatttttatcgtttttttttattattggggttttcgtagttaggggtaagttgggttttatttggagggttggtcggatataggtatagttttgagaggggataggtaagggttaaattatataaggtttgggaaaatacgagtatggattttatttttagtgtaatggaatgattttgaaaattgttaagtaggttgatgatggtatgatttattttatgttagagattatttggataattgtgcggataatggattggaggagataaagtaataagaagatgatgggaaaagttgaggagaaaagcgagggttgtttgttataggatgatagtagttaagacgttgcgtggaagttacgtaatagtagtatttataggcggtttgttttattcgtttatatttttattaatttgattttattaacgtttaaaacgtcggacgtatatttagttcgattttttttaaaataatagttttagtattttaatcgagattaaaaaggatttagttgattttgcgcgtagggggttttatataaagtcggagaagtagttgggtcgttggtcggttagggatttaagtcgttttaggtgagcgttttttggcgttattttcggttttaggtgaggtcgtcggaagcgggtatttggttttaagattcgttatagtgcgttttcgttgataggtttaattattacggcgaggttaaggcgcggggtcgcggttcgttcgagaagtttgagttgggtttcgatattttttgttcgatattcggtcgggattttcgaatatttatttagggtcgcgcgagcgtttataaggaaatagagacgttatcgtcgttagtcgttttggaatttagttcgacgggtcgtggcgtttgcgtttttagtttaattatagatatcgtttttaatagcgatttcgatttttgttggtgcggggaggttcgtggcgtatgcgtttggtttagcgtttgtttttaagtacgggtaagattacgtggtttggagggacgggtttagtagcgtttttttatttgcgtgcgagtagggcgagaaagttgttttcgttgtcggttagttgggtggtttgcgaaggacgtttcgtttttagcgaaaaatattttgttggtaaggtagttatgaaagttaagatatatttttacgtagagggggatgcgggtgtgttatgcgaatgtaaatttttataattaattttgaattttgtagagaaagttagtttgggtagggaagttagtcgtattttttggtcgttaggttgtgattttttttgttgttttttacgattgaatacgggaaggatggagagttgttttgtttttttgtttttttttcgttacgcgcgtatttgggcggagtgagtgtttatagagtttgtttatatgtgtatattgttttaagtttagcgtttagtattcgtttttagattttagaggtaggcggggtttcgaggtaggcgagaattttatcgtggtgcgtttgaagaaagaagatgtttatatagaggtttagaataatgggaggaagttgagtttcgtttggggaaagaagtagtttacgatgtaggatggttgtattagatagagttttttagtttaggatcggtgttaggagaaggtggattttttagggtcgcgaggtaggacgttttttgggagggtagtgattgcgggttattgtttgggaagtgttgtttttatttggaagtttgaagtcggataatagggaaatggggtcggaaaggggattaggaaatgttttataatattattttattttttttgttagcggttttaatttataatgtaatttgtttttgttggtggtagtgggtttttttgtttgttttgtttttgtttttgtttttgagacggagttttgtttttgtcgtttaggatggagtataatggtacgatgtgggtttattgtaattttttttttttaggtttaagcgatttttttgttttagtttgtcgggtagttgggattataggcgtttgttattatgtttagttaatttttgtgtttttagtagagacggggtttcgttatgttagttaagttgttcgcgaatttttgattttaggtgatttattcgtttcggttttttagagttttgggattataggtgtgagttattacgttcggtttgtaatttgtttttttttttttttaaaggagaaagaattttagcgattttttggataaaatattaagaatagaaaggtagttgattgatattagttttaatgtttgaaagtaaaagtagatatatagtggattttaatttttgagattgaggttttttttgtagttattttggagattttttttatattagaatttggataggaaaaaatggtttatttaaaaggggaagttgagagttattatttataaagacgtgggcggggtttaggaaaataatttagggtggtataattggagttattaagggtcgaattgtgttttttttttaaaatttatatgttggagttttaatcgttattttttatttttatttcgggattttagaatgtgattgtatttgaagatagggtttttaatgagggaatttagttaaatgaggttttaagttatttagtaagtcgtttaagtttttttatatttttgttttatttaatttttttgtattatttgtgttttttattttttggatgtttatgtttaggatttagggaattatttattttttttttaggaagggtgtgttataattggtttttacggtttagtaagtatattgtttatttttttttagttgttttagtttaggttgttataataaatgttatagattgggtagtttaaataataggtatttgttttttatagttttggaggttgggaagtttaagattaaatgtaggtagatttagtttatttaggggaagttttttttatggtttgtaaatggttatttttttattgtgtttttatatggggtagagagagggttttgtttttttttttttttaaggtattagtcgtattggattagggatttatttttatgattttatttaattagatttgttgtttaaagattttgtttttaaatagttatattgagggttagggatttagtatatgaatttggggggtatttagtttagtttatagtattaattttgtttttgttgattttatattaatagtttgaaattagttatagtaggagtatttatattatagaaatggataaattataaattggaattttgggggagaggtaattattaatttttttttatatatttttatttgttattttgttatttttgtgattttataagtaggtttttttgtttagaatttttttatttattttaaatttagataaagttttttttttttgaagtttttttttattttttgatagtaataggtttttgtattttttgtgtatttttaaattaatatttttaatgttattattatagtagttattgatttggattttaatttattttttttattattttttagtttttattttaagttgggtattattttaaatattttatttaaggggttttttttgtttattgtataaagaaagattatagtattgtggtagaaaaagagtttaatagatacgaggtcgattatgttaggtgggagatggagtgtatgtttaggttatttgatttaaagttcgaagtttataggttgggggttttttaaacgtagtttggaggaaggggtgggagtggttaggtaataggtgtttgttgttgattggttgaggttgagatgaaattatagggggagttaaagttgtttttttgtagtttgaattatttttgggtggggttgtgggagtggggttggcggtttaggtggagttatgggtgttagatatgtaaaaaatttggaaagatattttaaaaagttataaatagtggttgtattagtttgttttcgtgttgttaataaagatatatttaagattgggtaatttataaaggaaagaggtttaattgatttatagttaagtatggttggggaggtttttggaaatttataattatggtgatagggggagtaaatatgttttattttatatggtggtagtaaggagaagtgtagagtgaaggagggggaaagttttttataaaattattagatttcgtgagaatttattattagaatagtatggaggtaattatttttacgatttagttattttttatcggtttttttttataatatgtagggattatggaaattataatttaggatgagatttgggtggggatatagttaaattatattagtggtgttatttgtaggagtaattgggaaagttgagtattttataatttttagaataatgattgataatcgtttatatttgcgttttagtaggatttaggtttttttttttttttatagtttgatagttttttattagttttataaaaatagttgagttttaggtaaggtttgttattatgtaaattatagtttaaatgttttttaaagttagttggttttagtagtttagaaataattaagggaaaggtaagataggtgttggaatgggggcgttaatttagattttttttattgttataattttttaattgatataatttttgtaaaggtggttttattgttttgagtgttttattaatgttaatttgtttaattatgacgatatttatttttgcgtttttattttatatttcgtgtttaatataaggaatttttttaatgatttatagaatagaggtttgagttgatttttattttttaaaatttttgggtaacggtagtgtaataaaatcggtttggttttttgatttttataaatggggaaaatttatgaaaaataattagatgtattggaaatataataaatattttgtaaaaattataaattaaaaaagaagtaaaagtatattatttagaattgtgttggtaattattagaaaaatatgttaaatgtatgttgaataaatgaattagtaagtttaaaagtaatgaatgtataaaattatttattgtgaattgttattaggaaggattttcgatttagatgtcgagagagtttttagattttgagtaagaaagaattcggggtaagtttatagagtaaagtgaaagtaagtttattaggagagtaaaggaataaagaatggttattttataggtagaatagtaatttgggttgtttgatgagaatatttatagttattttttgattatatgttaaagaaggggtagattatttttgagttttttaggaaaggggtgggtaatttttagaattgagggttttttttatttttaaattatatagggtaattttttgatattgttatggtatttgtaagttgttatgtgttgataggagtgttttttagtatgttaatgtattataattagtatataaggaagagtgaggatgattagatattatttttattgttattttggttttcgtgggttttggttagtttttttatcgtaaattgtttaattagtaaggtttttgttatttgtattttgtgttaattttttattttattttgtgatttagaatgtttgtttttttgggaatatagtttagtaggttttagttttattttatttagttttaatttaagatggaattattttggtttaaatgtttttgatatatttttttttttttttttataagggaacgtttaatttaaagggtagtagagggataaagatttattttttgtaatttttttaagttgaataagggttatgttatttttatttaattattatggttttttgtatttagggtagtgaggagtttagttagaaggtattatt

SEQ ID NO: 31 - DNA, 5663 bp, Artificial Sequence
  chemically treated genomic DNA (Homo sapiens)
gatgagagaattaggttggacgtggcgttttatatttgtcgttttagtattttgggaggttgaggtaggaggattaagagtttgggaggcggaggcggaggttgtagtgagacgagattgcgttattttagttttagtggtagagtgagattttgttttaaaaaaaaaaaaggttaggcgcggtggcgtacgtttgtaattttagtattttgggaggtcgaggcgggcggattatttgaggttaggagtttgagattagtttggttaatatggtaaaattttgtttttattaaaaatataaaaattagataggcgtggtggtaggtatttgtaattttagttattcgggaggttgaggcgggagaatcgtttgaatttggaaggtagtggttgtagtgagttaagattatgttattgtagtttagtttgggtaatagagtgagattttattttaaaaaaaaaaaaaaaaaagaatgtagaagttttttataatttatgggtataattttttttatattgtttagtgataaggtagaggtagaataggttattataaaagatgtgttagattaaaggatagatgaatttttttttttttttttttttttttcgagagggagttttgtttttgtcgtttaggttggagtgtagtgttatgattttagtttattgtaaggtttgttttttaggttgaagcgatttttttgttttagtttttttagaagttgggattataggtgtttattattatagtcggtttattttttgtatttttagtagagattaggtttttttatgttggggacgttggttttaaatttttgattttaggtaatttgtttatttcggttttttaaagtgttgggattataggcgcgcgttattatacgtttttttttttttttttgagatagagttttaatttgtcgtttaggttgtagttggtatgatttcggtttattgtaatttatattttttgggtttaagtgattttttagttttagttttttaagtagttgcgattataggtattggttattacgttcggttaattttgtatttttagtagagatgtggttttattatgttggttaggttaaattcgaatttttgattttaggtgatttatttattttagttttttaaagcgttgggattatagttatgagttattttatttgttttagatagaaaattattttttttttgagacggagtgtcgttttgttatttaggttggagtgtaatggtacgattttagtttattgtaagtttcgttttttgggtttaagtaaatttttcgttttagttttttgagtagttggaattatatgtatttgttattatattcggttaatttttgtagttttggtagagatggggttttattatgttgtttaagttggtttcgaatttttgtttttaggtgattcgtttgttttagttttttaaagtgttgggattataggcgtgagttattgcgtcgggttaagataagagttttgttttagttgtttaggttggagtgtagtggcgtaattttggtttattgtaattttcgttttttgggtttaggcgatttttttgttttagtttttcgagtagttgggattataggtatgtattattatatttggttgattttgtatttttagtagagacggggtttttttatgttcgttaggttggttttgaatttttgattttaggtgatttgtttgttttggttttttaaagtgttgggattataggtatgagttattatatttggttaatttttgtgtttttagtagagatgagattttattatgttggttaggttagttttaaatttttgattttaggtgatttatcggtttcggttttttaaaatgttgggattataagtgtgagatatcgtgtttagtatttttgttttttttttttttttgagatagggtgttattttgttatttaggttggagtgtagtggcgtgatggtggttttttgtagttttagttttttgggtttaagtgatttttttattttagttttttaagtagttgggattatgtagggtttagttttatggggtttagtgggtgttttttttatgtacggagaagagagattgtaataaataaagatataagattaagaaataaagagaaaatagttgggtttcggggattattattattaagacgcggagattggtagcggtttcgaacggttaggttttttgatatttattgtatatatgataagggggtagcgtaaggaaggtgaattttttaagtgattgataaggtgaagtatgttacgtgattataggatgggggttttttttttttaggtaggtgaagtagagaaagaaggtagtatacgttagtatttttttttttgtatttataagaaagattaaagattttaagatttttattattttttttatcgttatttattacgaattttaaagacgaattagaagtaagggaggaatatgaaagtggataaggagcgtgattagtgaagtattatagggaggggtttaggttttcggatgattgcgtgtaggtttggataatatttagttttttataagaagttggtggagtagagtgttttttgatttttttaagtaaaggagatttttttttatggtttgttaagtaacgggtgtttttttagatattggcgttatcgtttgattaaggagtttttaagcggtttttatgcgggtatgatagaaggtttattttttgttttttatttattttttataatgtttttttagtatttgattttatatttatcggttatttttaggttatattagtaatgtaataaatagtaatattaaaagttaatgattaatgtttataataattgataattgtttatgattatttttataatttgtattatgattgtttttattgtaacgattttattatattgaaatagtttgtgttttcggttttttgtttcggtatttgggtaatttttcgtttataggattataggttcgtgttattatattgggtaatataaaaaatataaaaaaaaaattttgtattttttgtagagacgaggttttgttatattgtttaggttggaatttttatttttgttattgtatttaacgtatttttttttttcggttatttttatggttttttttttgatttttatagtttgaatatattgtatgtgttaggtaggggtttatatttattaagttttgtgtgtgttttgagtttaggttttttattattttgggaaaattattggtaattttttttttaaatattttttatgatttgtttttttttttttttttgggagttttattatatgtatatgatattatttgatatttttttatagtttttggatgttttttttaaaaaaaaatttttttttttttttattttttaacgtgggtaatttttattttttttagttgtgttgattttattgttgttttattagaaaaattatttgttattagcgtttttttttttttataatttgatgagttttttttttatgtatattgtttatttttcgtataagagatttttatatattaattatagttaatttaaatttttagtttgttttaatttttcgattatttttgagtttagttttgttaattgtttagtgttattttttgtttttgaaatagggttttgttttgttgtttaggttggagtgtagcggcgcgattttaggttgttttttgagtttatattattttttttaattagtagattgtaaagtgttcgagtcgggtcgtgtaggagtttttgtgggggttttatggatttcgaatttttatttttgttttatttttattttatgaatttaaggttttattttgtgtttcggtttttcgtttgtggtgttgaacgttatttacgttatttacgttatttacgtaattaatataataaagacgtttgtcgggaacgcggtttttcggttgaattttttcggtggttttaaggttattgttagaggatgcggacgggtttttagggtttttatttatttaggattttgaggtatattagtttcgtttaggtattcgtttttacgaatttttatgtttggttttgttttgagatagagtttcgttttgtcgtttaggttggttaaaagatagggttttagtcgggtgcggtggtttacgtttgtaattttagtattttgggaggtcgaggcgggcggattatttgaggttcggagttcgagattagtttgggttaatatggcgaaacgttgtttttattaaaaataataaaaattatttaggcgtggtggcgcgtatttgtaattttagttattcgggaggttgaggtaggagaattatttgaatttaggaggtagacgttgtagtgagtcgagatcgcgttattgtattttagtttgggcgatagagggagatttcgttttaaaaaaaggaaaaaaaaaaaaaagaaaagaaataaaagtgatggggtttcgttttgttgtttaggttagtttggaatttttgggtttaagcgattttttagtttcggttttttaaagcgttgggaatataggcgcggttatcgcgcggttttcggttgtcgaaatatcgttttgcgcgcggatcgttcggtcgtcgggaggaatagcggttgttcggagtttagaggcgcgcgcggttttgcgtttttcgcggcgttttgagtttgtttcggtttggttggttaggtggtttttttaggattaattttagttattttcggtaggaattacgtttgaggggcggtagtttgttcgcgcgagacgttttcgcggattatatcgcggcggtaaagttaaacgtaaaaattattttatcgcgcgtaggcgttttttttaggattaatatggttacgacgtaaggtttcgatttgaggggcgtggtttggtcgtcgttagttaacgggtgtgcgcgtttggtcgtagttaataggaaggtagcgcgggttcgggcgtagggagtcgtcgtcggggttgtaggcgttaaggttatgttcgattcgtgggtttcgaatttcgtttcgggttaggatttagggggtcgtcggagggtttgggtcgagttgttgggtaggtgggcgcggtaggtcgcgggagtgggcggcgttcggttcgggacggtttcgtcggtttttcgattttttttcgttagagttttcgtcggtcggattttcggacgtcgcgttcggggggttgtgcggggtgggcgttcggttggggcggcgcggttgtttcggattcggttttttttgcgtttgggcggacgtttattagatcgtcgttcgcggggcgtttttttttttttcgaacgtcgttttcgtcggtcgttttgttaggcgggtttggggtgcgcggtttggggttttttttagcgtagaggtcgtttttcgttagtcgttttcgggtttttttgtttcgggtttttttgggtcgtttttttcggcgttcgcggtggggtcgttttcgttagtttttcgagatttgcgttttggggaggagtttcggttttttttcgggagggtgtcgttggtgggttttttcgcggcgtttatttgcgcgtcgggtcggggatttcgtgtgtgaattgtgttgtgatggtttcgaatcgattttttttcgtagt

SEQ ID NO: 32 - DNA, 5663 bp, Artificial Sequence
  chemically treated genomic DNA (Homo sapiens)
gttacggagagaagtcggttcgaaattattatagtataatttatatacggggttttcggttcgacgcgtaggtggacgtcgcggagaaatttattagcgatattttttcgaagaggggtcggggtttttttttagggcgtaggtttcgggaaattaacggagacggttttatcgcggacgtcggggaagacggtttaggagggttcgaggtaggggagttcggggacggttggcgaggggcggtttttgcgttgaggggagttttaggtcgcgtattttaggttcgtttgatagggcggtcggcgggggcggcgttcgggaaagaagggagcgtttcgcgggcggcggtttggtgggcgttcgtttaggcgtaggaggggtcgggttcgaggtagtcgcgtcgttttagtcgggcgtttatttcgtatagtttttcgggcgcggcgttcggggattcgatcggcggaggttttggcgggaagggatcggggaatcggcgaaatcgtttcgggtcggacgtcgtttattttcgcggtttgtcgcgtttatttatttagtagttcggtttaggtttttcggcggttttttgggttttggttcgaggcggagttcgggatttacgagtcggatatggttttggcgtttatagtttcggcggcggttttttgcgttcgagttcgcgttgtttttttattggttgcggttaggcgcgtatattcgttggttggcggcggttaggttacgttttttaggtcgaggttttgcgtcgtggttatgttggttttgggggaggcgtttgcgcgcggtgaggtagtttttgcgtttggttttgtcgtcgcggtgtagttcgcgggggcgtttcgcgcgggtagattgtcgttttttaagcgtggtttttgtcgggaatgattggggttggttttgaagagattatttggttaattaagtcgaggtaggtttagagcgtcgcggggagcgtaaagtcgcgcgcgtttttgagtttcgggtagtcgttgtttttttcggcggtcgaacggttcgcgcgtagggcggtgtttcggtagtcggagatcgcgcggtagtcgcgtttgtatttttagcgttttgggaggtcgaggttggagggtcgtttgagtttaggaattttagattagtttgggtaatagagcgagattttattatttttgttttttttttttttttttttttttttttttttgagacggagtttttttttgtcgtttaggttggagtgtagtggcgcgatttcggtttattgtaacgtttgttttttgggtttaggtgatttttttgttttagtttttcgagtagttgggattgtaggtgcgcgttattacgtttggatgatttttgttatttttagtagagatagcgtttcgttatgttggtttaggttagtttcgaatttcggattttaggtgattcgttcgtttcggttttttaaagtgttgggattataggcgtgagttatcgtattcggttgagattttattttttaattagtttgggcggtagagcgagattttgttttaaaataaaattaaatataagaattcgtaaaagcgagtgtttaggcgaagttaatgtgttttaaagttttgggtaagtagaggttttggagattcgttcgtattttttggtagtggttttggaattatcgaagggatttagtcgaagggtcgcgttttcggtaggcgtttttattgtgttgattacgtagatggcgtagatgacgtagatgacgtttagtattataaacgaagagtcgaggtatagagtggggttttggatttatgagatggggatggagtagaaatgagaattcggagtttatgaaatttttataaagatttttgtacggttcgattcggatattttgtaatttgttggttgagggggatggtgtgaatttagggaatagtttgagatcgcgtcgttgtattttagtttgggtaatagagtaagattttgttttaaaaataaaaaataatattaagtaattaataggattagatttagaggtgatcgagaaattgaaataggttggaaatttaaattaattgtgattaatatgtggaggttttttgtacgaaaggtgaataatatgtatgaggaggaaatttattaaattataagaaaggaagaacgttgataataggtaatttttttgatggggtagtagtaggattaatatagttgagaaaaataggaattatttacgttggaaaataaagaagaaaaaaagtttttttttaaaaaaagtatttaagaattgtgggaaaatattaaatgatattatatgtatgtaataggatttttaaaagaagaagaaagaataaattataaaaaatgtttgaagagaaaattattaataatttttttaaaataatgaaagatttgagtttagagtatatataaaatttgataaatatgagtttttgtttgatatatgtagtgtatttaaattgtggaaattagagagaaaattatgaagatggtcggaggaaaaagatacgttaaatatagtaataaaggtaagaattttagtttgggtaatatggtaagatttcgtttttataaaaaatataaaattttttttttgtattttttgtattgtttagtgtggtgatacgagtttgtagttttgtgggcggagaattatttaggtgtcgaggtaagagatcgaaggtataaattattttagtataataaaatcgttataataagaatagttataatataaattatggagatgattatggataattattaattattataaatattaattattagtttttaatattattgtttgttgtattattaatataatttaggaataatcggtgggtatagggttaggtgttgaaaggatattgtgagaagtgagtggaaggtaagaggtgaattttttgttatgttcgtataagggtcgtttgagggttttttggttaagcggtaacgttagtgtttgggaaggtattcgttatttagtagattatgaaagggagttttttttgtttggaggagttagggaatattttgttttattagttttttgtgggaggttggatgttatttaggtttgtacgtagttattcggaggtttaaatttttttttgtggtgttttattggttacgttttttgtttatttttatgttttttttttatttttggttcgtttttgaagttcgtagtagatagcggtagaagaaatagtgaaagttttaaagtttttgattttttttataagtgtagagaagaaaatgttgacgtatgttgttttttttttttgttttatttatttgaaagggaagggtttttattttgtaattacgtgatatgttttattttgttaattatttagaagatttattttttttacgttgtttttttgttatgtatgtaatagatattaaagagtttagtcgttcggggtcgttattagttttcgcgttttgatggtagtggttttcggggtttagttgttttttttttattttttggttttgtgtttttatttattataatttttttttttcgtatatggggagaatatttattaagttttatagggttggattttatatagttttagttatttgggaggttgaggtgagaggattatttgagtttaggaggttgaggttgtagggagttattattacgttattgtattttagtttggatgatagagtgatattttgttttaaaaaaaaaaaaaaggtaggggtgttgggtacggtgttttatatttgtaattttagtattttggggggtcgaggtcggtggattatttgaggttaggagtttgagattagtttggttaatatggtgaaattttatttttattaaaaatataaaaattggttaggtgtggtggtttatgtttgtaattttagtattttgggaggttaaggtaggtagattatttgaggttaggagtttaagattagtttgacgaatatggagaaatttcgtttttattaaaaatataaaattagttaggtgtggtggtgtatgtttgtaattttagttattcgggaggttgaggtaggagaatcgtttgaatttaggaggcgaaggttgtagtaaattaagattgcgttattgtattttagtttgggtaattagagtaaaatttttgttttggttcggcgtagtggtttacgtttgtaattttagtattttgggaggttgaggtaggcgggttatttgagagtaggagttcgagattagtttggataatatggtgaaattttatttttattaaaattataaaaattagtcgggtgtggtggtaggtgtatgtaattttagttatttaggaggttgaggcgggagatttgtttgaatttaggaggcggagtttgtagtgagttgagatcgtgttattgtattttagtttgggtgatagagcgatatttcgttttaaaaaaaagataattttttgtttaggataagtggggtggtttatgattgtaattttagcgttttgggaggttgaggtgggtagattatttgaggttaggagttcgaatttggtttggttaatatggtgaaattatatttttattaaaaatataaaattagtcgggcgtggtgattagtgtttgtaatcgtagttatttgggaggttgaggttggagaattatttgaatttaggagatgtaggttgtagtgagtcgagattatgttaattatagtttgggcgatagattgagattttgttttaaaaaaaaaaaaaaaagcgtatggtggcgcgcgtttgtaattttagtattttgggaggtcgaggtgggtagattatttgaagttaggagtttgagattagcgtttttaatatggagaaatttggtttttattaaaaatataaaaaatgagtcggttgtggtggtgggtatttgtaattttagtttttggggaggttgagataggagaatcgttttagtttgggaggtaaattttgtagtgaattgagattatgatattgtattttagtttgggcgataagagtaaaattttttttcgaaaagaaaagaaaagaaaagaaaagtttatttgttttttgatttggtatattttttataatggtttgttttgtttttgttttgttattgagtagtgtggggagaattatgtttatgagttgtgaggaatttttgtatttttttttttttttttttttaagatggagttttattttgttgtttaggttggattgtagtggtatgattttggtttattgtaattattgttttttaggtttaagcgattttttcgttttagtttttcgagtagttgggattataggtgtttgttattacgtttgtttaatttttgtatttttagtagagatagggttttgttatgttggttaggttggttttaaatttttgattttaggtgattcgttcgtttcggttttttaaagtgttgggattataggcgtgcgttatcgcgtttggttttttttttttttgagatagggttttattttgttattaaggttagagtggcgtaatttcgttttattataattttcgttttcgttttttaggtttttggtttttttattttagttttttaaagtgttgggacgataggtgtgaggcgttacgtttagtttagtttttttatt

SEQ ID NO: 33 - DNA, 5776 bp, Artificial Sequence
  chemically treated genomic DNA (Homo sapiens)
atgttttaattttttttgagtgtatatttagttgtatattgagtaattgttgggttataaggtaattttgtttaattttttaaggaattgttagtttgttttttaaagttgttgtatcgttttatagttttattagaagtatatatgggtaacgatttttttatatttatgttaatatttgttgttatttgtttttgattttaattattttagtgggtgtgaagtaatattttattgtggttttggtgtgtatttttttaatgattaatgatgttgagttgagtatttttttttgtgtttattggagaaatgtttttttagatttttcgattatttttaattggattattgttattattattatttttggattagggttttgttttgttatttaggttataatgtagtggcgtgattatggtttattgaagttatagttttttgggtttaagtagtttttttgttttagttttttgagtaattgggattataggtgtgtattattatggtcgattaattttttattttattgtagagatagggttttattatgttgtttaggttggttttgaatttttgggtttaggtaatttttttgttttagttttttaaagtgttgggattataggtgtaagttattgtgtttggttagtattttttttatatgttagatataggtttttgaatagatatatgatatgatatgatatatgatttataaatgatatatgatttataaatattttttttattttgtgggttgtttttttatttttttgataatattttttaatgtataaatatttttttttttttttttttttttttgagacggagttttgttttgtcgttaggttggagtatagtggtattatttgggtttattgtaattttcgttttttgggtttaagtgatttttttgttttagttttttgagtagttgggattataggcgtgtattattacgtttagttaatttttgtatttttagtagagacggggttttattatgttggataggatggttttaattttttgattttatgattcgttcgttttggttttttaaagtgttgggattataggtatgagttatcgcgtttggtttatataaaaatttttaattttgagaaagtttagtttattttgttttttttttttattgtttatgtttttggtgttatatgaaataaattattgtaaaatgttataatttaattttagaatatttttattatttttttaaaattttttatattgattttttaattttattttaggttaatgatttgttttcggttttttatttatttatttatttatttatttatttagagatggagttttattttgttgtttaggtcggagtgtagtggcgtgatttttgtttattgtagtttttgttttttgggtttaagtggtttttttgttttagttttttaagtagttgggattataggtatgtgttattacgttcggttaattttttgtatttttagtggagatggggttttattatgttagttaggttggttttttgttttttggtgattcgtttattttagttttttaaagtgttgggattataggtatgagtttggtttgtttttaattttttttttttttttttttttttttgagatagttttgttttgtcgtttaggttggagtgtagtgagtcgagattgcgttattgtattttagttcgggtaatagagcgagatttcgttttaaaaaaaaaaagtttgttggtgtatttttttgtttttttttattgttaaattattggttttgattaattgatggatattttgattgtttttagtttttagttattatgaatatttttagttattatgagtatttgtaataaattttagtgtggacgtatgtttttattttttttgggagtattttttggagtggaattgttgagttttatggtaaatttgtgattgatttttttttttttttttttttttgagatggagttttgttttgttatttaggttggagtgtagtggcggggttttggtttattgtaagttttattttttgggtttacgttatttttttgttttagttttttgagtagttgggattataggtgttcgttattacgtttggttaattttttgtatttttagtagagacggggttttattgtgttagttaggatggtttcgatttattgatatcgtgatttatttgttttggttttttaaagtgttgggattataggaataagttattgcgttcggtttatgattaattttttaagaaattgttaaatttttttgaagtgagtgtattattttatatttttattagtagtgtatgagggttttttatatatatttttattaatatttggtataatttgtttttattgtagttattttatgtatgtatgtgtatagtgtttttatttttatttatttatttttgagatagagttttattttgttatttaggttggagtgtagtggtatggttttagtttattgtaattttcgttttttaggtttaagtgattgttatgttttagttttttgagtagttgggattataggtgtttgttattatgtttagttaatttttgtatttgtagtagagatagggttttgttttgttggtttggttggttttaaatttttggttttaagtgatttatttgttttagttttttaaagtgttgggattaaaggtgtgagttattacgttcggttgtgtgaagcgtttttttattttttgagacgaagtttcgttgtgttatttaggttagagtttagtggtaggatttcggtttattgtaatttttatttttcgggtttaagttatttttttattttagttttttaggtagttgggattataggtatgtattattatgtttgtttaatttttgtatttttagtagagacgaggttttattaagttggttatgttggttttgaatttttgattttaagtgatttatttattttagttttttaaagtgttgggattataggtataatatggttcggttttggttatgtttttaattgtgtttttttaatagttaataatgtcgagtatttttttatgtgttttttagttattagtagattttttttggtaaaatgtttttttttttttttttggtttattttaaaattgttttttgttttgttttgagatagggttttattttgttgtttacgttggagtgtagtggtttaattatggtttattgtagtttcgatatttttgagtttaggtgatttttttatttaagtttttcgagtagatgggattataggtgtgtgttattatgtttagttaatttttgtattttttttgtagaggtggggttttgttatgttgtttaggtaggttttaaatttttgaggtttaaatgatttttttattttagttttttaaagtgttgggataataggtatgaattattatatttagttaagattgtttttaaaaattttttttttgagttttgggagtttttatgtgttagggatattagttttttatgaggtatataattagtaagtagttttttttattttgtgattgtgatttttttttttttgaggtagggttttattttgttatttaggttggagggtagtggtgtgattatggtttattgtaatttggaatttttaggtttaagggttttttttattttagttttttaagtagttgggtttataggtgtgttattgtgttagggttaatgttttaaattttttgtagagataatgtttttataaaagatattatttttgttgtttaggttggttttgaatttttggttttagggaattttttagttttagttttttaaagtgttgggattatagtatgagttatatttagtttatgatttttttttttttttttttttttttttttttttttttttgagatggagtttcgttgttgcgtaggttggagtgtagtggggcgatttcggtttattgtaggttttggttcgcggggtttacgttttttttttgttttagtttttcgagtagttgggattataggcgttcgttatatcgttcggttaattttttgtatttttagtagagacggggttttatcgtgttagttatgatggtttcgattttttgatttcgtgattcgttcgtttcggttttttaaagtgttgggatcgtaggcgtgagttacggcgttcggttttagcgtatgattttttaatgatgtttttgtagtataagagtttttaattttaataaagttaatttttttttaaattgtataagtttttagtgttgtgtttaataatttgttgttaaatttaaggttataaagttgtttttttacgtttttttttttttttttttttgagacggagttttattttgttatttaggttggagtgtaatggtacgatgtcggtttattgtaattttcgttattcgggtttaagcgattttttcgttttagttttcggggtagttgggattataggcgtacgatattacgttttgttaatttttgtatttttgtagagaaggttttattatgttagttaggttgttttacgtttttttttagaagttttatatttttggtttttatatttagtttgtgatttattgagttgattttatgtacgtatgtatggtcgcgttttttttttttttgttttttttttttttttttttttgtatatggatatttaatttttttagttttatttaatttgaaatgattgggtaggtatttttgagtagtgtaagtatagagcggtattgttagtagattatacgcggtagaaagtcgattttggtgagcgtgttggtgttcgatagtgagtagagaaaggatggacgattacggagcgttttcgtttttagttatcgttttttggaaatattattcgtcggggcggagttgtttcgtttcggtgcggtattacgatttttagtatgtatttcgtagtcggttttcggtggaagcgggaatttaggaggatttgggggtgtggtagcgaggaagggtcgagttacggattgtggggtcgaaattcgttttcgtttattttttttcgaggttgtggttttcgcgagagtcgagcgggtcgtatcgtcggtcgtgcgattgttttagttagatacgatttcggtttttagttcgtttaagtttgtttggggttgttgattcgtttttttttcgagtttttcgcgggaattaattttttaagaggattaatcgtagtttagagtttcgtagattcggttaattagaggcgaggttgagagttcggcgggtcgcggggagagagcgttttatttgttttggaaagtttgggcgggtggattgggatttcgagagaagtaggggagttcggcggggtgtagaagtgtttaggttttttttcgttggggttgggagtttgggtaggttagttttattttttttaagttcgtttttggttttcgggtttagtttcggttattatgtttcgttagattatttttgtgggttttagttgtttggatttgtggagggaaaagaatgatcggttcgttcgataggttaaggtaatacggttgttggtattttcggtttgtagttttaagatttttgaaagcgggtttgtagtggatttattttaatagatggggagggattgagtttgattaaagagttagaaatgattggagaatgtattttttgttattgttgtaaggggagaaaaaaggattgatttttagtgataattttttttttatgtggtagg

SEQ ID NO: 34 - DNA, 5776 bp, Artificial Sequence
  chemically treated genomic DNA (Homo sapiens)
tttgttatatgagggaggggttgttattgaggattaatttttttttttttttttgtagtagtggtaagggatgtattttttagttatttttggttttttggttaagtttagtttttttttatttgttggggtaaatttattgtaaattcgtttttagggattttgaggttgtaaatcgagggtgttagtaatcgtgttattttggtttgtcgaacgagtcggttatttttttttttttataggtttaggtagttggagtttatagaggtggtttggcgggatatggtggtcgaggttgggttcggagattagaagcggatttaggaagggtgaagttggtttgtttaagtttttaattttagcggggaggggtttgggtatttttgtatttcgtcgagtttttttgtttttttcggggttttaatttattcgtttaggttttttaggatagatgggacgtttttttttcgcggttcgtcgggtttttaatttcgtttttggttggtcgggtttgcgaagttttgggttgcggttggtttttttgaagagttagttttcgcgggaaattcggggaggaaacgagttagtaattttaaataggtttaggcgggttagaagtcggggtcgtgtttgattggggtagtcgtacggtcggcggtgcggttcgttcggttttcgcggaggttatagtttcgagaaagggtgggcgggagcgagtttcggttttatagttcgtggttcggttttttttcgttgttatatttttaggtttttttgggttttcgtttttatcgagggtcgattgcgaggtgtatgttgggagtcgtagtatcgtatcggggcggaatagtttcgtttcggcggatggtgtttttagaaagcggtaattggagacgagggcgtttcgtaatcgtttattttttttttgtttattgtcgagtattaatacgtttattaaggtcggttttttatcgcgtgtagtttgttggtagtgtcgttttgtatttgtattgtttaaaagtatttgtttaattattttaaattaaatggagttaggagaattgaatatttatatgtaaaaaaaaaaaaaaaaaaaagataggaaagaaaagaacgcgattatatatacgtatataaaattaatttaatggattataaattaaatataagagttaaaaatataaaatttttaaaagaaaacgtaaagtagtttaattaatatggtgaaattttttttataaaaatataaaaattagtagggcgtggtgtcgtgcgtttgtaattttagttatttcggaggttgaggcggaagaatcgtttgaattcgggtggcggaggttgtagtgagtcgatatcgtgttattgtattttagtttgggtgatagagtgagatttcgttttaaaaaaaaaaaaaaaagaaaacgtaagagaatagttttatgattttgggtttggtaataagttgttagatatagtattaaaagtttgtataatttaaaaaaaagttaattttattaaaattaaaaatttttgtattataaagatattattaagaagttatacgttggggtcgggcgtcgtggtttacgtttgcgattttagtattttgggagatcgaggcgggcggattacgaggttaggagatcgagattattatggttaatacggtgaaatttcgtttttattaaaaatataaaaaattagtcgggcgatgtggcgggcgtttgtagttttagttattcgggaggttgaggtaggagaaaggcgtgaatttcgcgggttagagtttgtagtgagtcgagatcgttttattgtattttagtttgcgtaatagcgagattttattttaaaaaaaaaaaaaaagaaaagaaaagaaaagaagaaaaattataggttggatgtggtttatgttgtaattttagtattttgggaggttgaggttggaggattttttgaagttaggagtttaagattagtttaggtaataaagatggtgttttttgtagagatattatttttataaaaaatttaaaatattaattttggtataataatatatttgtagatttagttatttgggaggttgaggtgggaggagtttttgagtttaggagttttaggttgtagtgagttatgattatattattgttttttagtttgagtaatagagtgagattttgttttaaaaaaagaaaggttatagttatagagtgggagaaattatttgttaattatatattttataagggattggtatttttaatatataaaaatttttaaaatttaagaaaaagatttttaaaaataattttagttgggtgtggtggtttatgtttgttattttagtattttgggaggttgaggtgggaggattatttgagttttagaagtttaagatttgtttgggtaatatagtaaaattttatttttataaaaaaaatataaaaattagttgggtatggtggtatatatttgtagttttatttattcgggaaatttaggtgggaggattatttgagtttagggatgtcgaagttgtagtgagttatgattgagttattgtattttagcgtgggtaataaagtgagattttgttttaaaataaaataaaaaataattttaagatggattaaaaaaaaaaaaaaagatattttattaaaaaagatttattaatggttaagaaatatataaaaagatgttcggtattattagttattagagaaatatagttaaaaatatggttagggtcgggttatgttatgtttgtaattttagtattttgggaggttgaggtggatggattatttgaggttaggagtttaagattagtatggttaatttggtgaaatttcgtttttattaaaaatataaaaattaggtaggtatggtggtgtatgtttgtaattttagttatttgggaagttgaggtgggagaatggtttgaattcggaaggtggaggttgtagtgagtcgagattttgttattgaattttagtttaggtgatatagcgagatttcgttttaaaaaataaaaaaacgttttatatagtcgggcgtggtggtttatatttttaattttagtattttgggaggttgaggtaggtggattatttgaggttaggagtttgagattagttaagttaatagggtaaaattttgtttttattgtaaatataaaaattagttgggtatggtggtagatatttgtaattttagttatttaggaggttgaggtatgataattatttgaatttgggaaacggaggttgtagtgagttgagattatgttattgtattttagtttgggtgatagagtgagattttgttttaaaaataaataaataaaaataaaaatattatatatatatatatataaaatgattataataaaaatagattatattaagtgttggtgaggatgtgtatgaggaatttttatatattgttggtgggaatataaaatagtatatttattttagaaaagtttggtagttttttaaaaagttaattataggtcgggcgtagtggtttatttttgtaattttagtattttgggaggttaaggtaggtgaattacgatgttagtagatcgagattattttggttaatatagtgaaatttcgtttttattaaaaatataaaaaattagttaggcgtggtggcgggtatttgtagttttagttatttaagaggttgaggtaggagaatggcgtgaatttaggaagtggagtttgtagtgagttaagatttcgttattgtattttagtttgggtgatagagtaagattttattttaaaaaaaaaaaaagaaaaaaaagttaattataaatttattataagatttagtaattttattttaaagaatatttttaagagaaatgaaaatatacgtttatattgagatttgttgtaaatatttatagtagttaaaaatgtttataatggttaaaaattgaaaataattaaaatgtttattagttggttaaagttaatgatttagtaatgaaaaggggtaaaagagtgtattaataaattttttttttttgagacggagtttcgttttgttgttcgggttggagtgtagtggcgtaatttcggtttattgtattttagtttgggcgatagaataagattgttttaaaaaaaaaaaaaaaaaaaaaaaagattgaaaataggttaggtttatgtttgtaattttagtattttgggggattgaggtgggcggattattagagggtaggagattagtttggttaatatagtgaaattttatttttattaaaaatataaaaaattagtcggacgtggtggtatatgtttatagttttagttatttgggaggttgaggtaggagaattatttgaatttaggaggtagaggttgtagtgagtagagattacgttattgtatttcggtttgggtaatagagtgaaattttatttttaaataaataaataaataaataaataaataaaagatcgaaaatagattattggtttggggtaggattagggagttaatgtagggaattttggggggatgatagaaatgttttaaaattaagttgtggtattttgtaataatttattttatatgatattaaaagtataagtaatgaaagaaaaaaataggatgaattggatttttttaaaattaagaatttttgtgtaggttaggcgcggtggtttatgtttgtaattttagtattttgggaggttaaggcgggcggattataaggttaagagattgagattattttgtttaatatggtgaaatttcgtttttattaaaaatataaaaattagttgggcgtggtgatgtacgtttgtagttttagttatttaggaggttgaggtaggagaattatttgaatttaggaggcggaggttgtagtgagtttagatagtgttattgtattttagtttggcgatagagtaagatttcgttttaaaaaaaaaaaaaaaaaaaaaagaatgtttgtgtattaaaggatattattaagaaaatgaaaagataatttatagagtggagaaaatatttgtaagttatatattatttgtaaattatatattatattatattatatatttgtttagggatttgtatttagtatgtaaaaagaatgttagttaggtatagtggtttatatttgtaattttagtattttgggaggttgaagtaggaggattgtttgagtttaggagtttaagattagtttaggtaatatagtggggttttgtttttataataaaataaaaaattagtcggttatggtggtgtatatttgtagttttagttatttaggaagttgagataggaggattgtttgaatttaggaagttgtggttttagtgagttatgattacgttattgtattatagtttgggtgatagagtaagattttggtttaaaaataataataataataataatttaattaaaaatagtcgaagaatttgaagggatatttttttagtaagtataagaaaagatgtttagtttagtattattaattattaaggaaatgtatattaaaattataatgagatattattttatatttattaggatggttagaattaaagatagatgataataagtgttgatatggatgtggagaaatcgttatttatatatatttttggtaagattgtaaaacgatatagtaattttggaaaataaattggtagttttttaaaagattaaatagagttattttatgatttagtagttgtttagtgtatagttaggtatatatttaagagaaattaaaatat

SEQ ID NO: 35 - DNA, 11131 bp, Artificial Sequence
  chemically treated genomic DNA (Homo sapiens)
tgggaaaatggagattaagaggtatgattataaatttagattgtaagtggtatatatatattgaatttagtttttttttttatttaaatttgaaatatttggtaaaggatgtttttataaattttaggaaggtatttattttattttaattttaaaggaacgtattatatagaggtggtattttaaaatgatagagaacgcgagttttggaagttagattgtttgtgtttataatttagttttattatttagtagttttgggatttggggtaaattttttaatattttattttttaggttttttaattaagaaaatggaggtaataataggatttattttataaagttgtggtgaggattataatgtacgtaaagtatttagaaaaaaagggtttgatatatggtaagtttttaataaatagtggttattaatatatttttagaatttattataaaaattaggaaataaattgattttttaaaggtttaaatgtatttaggaatgggaaattaatatatggttatttatagtattgggatatatttaattttaagatttgtgttgtttgaatgggatgaattagtaagattatgtttattttttttaagtgtttaattttagaaagtaatgattattagttttgttaattttttttttattaattttgtaaaaggtataaaagtaatatggaaaaaagaggtagagaagatagaagtagattagtatataaggtgatttttttagattagaatttgatgtgtttaatgaatgggtgatgtttttatgtttggttgaggtattttaggattttatatttatataaaagggcggggagtgggaagggggtaggtttattattttatttttagttatagtatttttttttttatttattatattttataaaagtttttttttagttttagtattaggttagatttttttttgttttagggttttggtaggttgattttttttttatttggaatattgttatttttttattatttttttgtggttattttttttttattttaaatttttatttttaaagttattatttttgatatttttatttaaaataggtttttttattgggtgtagtggtttatgtttgtaattttagtattttgggaggttgaggcgggcggattatttgaggttaggagtttaagattagtttggtaaatatggtgaaattttgtttttattaaaaatataaaaattagttaggtgtggtggtatgcgtttgtaattttagttattttggaggttgaggtaggagaattatttgaatttgggaggtagaggttgtagtgagttgagattattttattgtattttagtttgggtaatagagtaagattcgtttaaaaaaaaaaaaaaggttttttttgttattttttattatagtatttagtgtgttttttgtgtagaaggtatttatgtaatttgtaattaattatttatgtatttatttttaatgttttttttattagatagttttatgatggtaaagaatatttttgtttattatattaattttatttattttaatacgttgattagtatagagtagacgtttaataaatatttgttgaatgaatgaaataatgatttttaaggttttttttagttgtttaataattattaggtaataggataaaaaatatttagtgtaaagggggaggttttacgtggggtataggaaatatttgattttttattatgataaaaaaataaataattaaatggttttattttaagaagtttagttaaaatttgattgatgtgggttgggtatggtggttgacgtttgtaattttagtacgttgggaggttaaggtaggcggattataaggtgaggagatcgagattattttggttaatatagtgaaatttcgtttatattaaaaatataaaaaattagtcggttgtggtggcgggcgtttgtagttttagttattcgggaggttgaggtaggagaatggcgtgaattcgggaggcggagtttgtagtgagtttagatcgtgttattgtattttagtatgggtgatagagcgagatttcgttttaaaaaaaaaaattaataaaaaaaaaatatttgattgatgtaatttattaatgagtaatagtttttttagtgattttgtaagttttgtttttagatgtgttttaattattttaataattggttatttaggtttaaatttttgttaaataatgggttggttatataagaattagttgataagtttattaaaaatatagatttttggattaaaattttaggagattttgatttagtatttgtgaagttttagaatttatataattaaaatttttttattttaaatagatattatgtgtatgtaatatataggtttagaggtaagaaatagtttatagtaaagttttttttttatttttgtttttttggtattaagtttttttttttataagttattgttgttattaattttttgtgtatttttacggataattatttgtttaagtaagtatatatatattttttgatttgtatatttaaagagttattttaattttgttttttttaattttatttataatatatgttggaaatgagggtatttgtatttttaataagtattttagatgattttgatgtgaagttaaatatagaaataatttatggatttacggttgtgagattaagtttaatttattacgatatattagaaatttaaggatattgaaggatgtttttaaaagtagttttttttatttgatttttgttttttcgttttatagagatgaattaaattattcgttagtgtttttatagaagttaggaaaaattagttatttaaatggatgttgttaaagttttaatttttaataattggaatttttttttgtttattgttattcgaaattataaatttgataatttttgtgttatataagatatttttgtatttaagttgaaataaggtgtgatcgttattgaatgagggttggttttttttttgttagttaagtagtttaatggagtataatcgaaatattttttttattaatttttatttatatagttttatttaaattttttttaaaattgtttttttgttatttgagtaaaagtaattaatttagaaattgtggggagaagattgtttggtgaattttggagttcggggttttttttattttgatttgatttatttgggggcgatggttgggtttttaggtagttttattttttttattttatttatttttgggattgtaaagggagtttttttttggtattgagataaggtttttcgagagttattcgattttcgtagtgtttttgttattacgaggggtatcgcgcggtaggtatttttattttttttatatcgcgttaaggaggtaggagtgtattgggttattcgagcgaggtagagaattcgtcgggatttagcgttggtttattttatattttcgtcgaaggggttttcgagggttcggtttttgtttaagttttttgtaaggtggaggtatgatttttttattttttttttttgaatttaaacgtgaggatggtatttgcgaggttaaagcggggtttagatggtttaaattttagattatttttttttttattcggttttttttttatttttttggttatgtgttttttcgtgagtcgtggtttaagtttttttatttcggttagtcgttattttttggtttggttttcgtttttttgtttatttggtttttttttttttatttagtatgatggggttgagtcgtcgggttaggtttttggataggtcgtatacgtagagttttatcggatagagattcggcggttttattgggattcgtggcgacggcggttacgacggttttcgggtattcggtagcggtttggattttttcgtattcgacgggagtgcgaagcggagggagagggggggatcgagttcgggttcgggttgaggggtgggggagaggtcgttttgcgttgttcgcgtttttatattcgttatcggtaacgattattgtgaggtgatagagaggggatagggagggtttatacggaagagggggcgggggtagggatgtatttttgcgtatgtgtttatagttttgacgtaggaaggggcggggttttgtcgaagggggcggggttttcgttgatgggttggttttcgttagggatataggtagaagttggttggggagtgtgcgtgttagtttgacgcgatatagtgcgtatatgcgtgatgacgtagagggcgttgattgggatcgagtatagggttcgcgtatgcgtggattgtcgttttttgtttaagttggtcgtttttttgcgttaaaggtaagcgggtcgttatttatttgtgttgttcgttagttaggtttggtttcgtttcgtttcgttcggtcggtttcgcgcgtttttatagttttgttagagggttagcgttagttttaagtgtgcgaattcgaggagtagcgatagattcgagattacgtttttttttcgggaaggaggcggtatttcgcgtttgaggttcgtttgcgtttgaggttcgtttgcgtttgcggttcgtttgcgtttgaggtttgtttgcgtttgagattttattgggcgtgattgaggaatttggggaggtttttgggcggtattgaggacgagggggttcgttagttagtatagaattttggagcgggaattttttatcgtttaaatggcgtcgggggcgggattttcgggatttggttttcgcgggtcgtcgtcggttttgaaacgtgagggatagttgagatgaggtagttattgggatggtttttatgcgtatttatatgtagttcgattgtcgagttttcgaggtagtaggatttatcgtttatattttttattattaattaagtttttagaatagattttataagaatttagaggtcggtattttttcgatttaaatttgtttgttattgacgttaacgtttttcgtttagtgagtagtagttaatatgttagggtgggagttatattataaaatcgagggcgatgaagaagtagaggaagaataagaagagaattttgaagtaagtggtaagtgattttagtatgtagtgttattcggtgtgtggaagaaagattttttttgtttatttttgttggatggattttgttgtttgatggtttgtttttttttttttagataattttgaaatttttttttttttttgaatttcgtagagttattttaggtttttatatgtagattttattttagtgtgttttaagttttttttggatattggtagtttgatattttttggtttttgataaatggttatgattataggtattttttgttattttaagtggtttaggtgagattttttttatttaggaaagtagtgttattattttaggattttagtgtaaaaatgtttttattttgtaataattatattaattaaagaataaacgtaagtaatatagttataggaaagtgattgatttttttattatagtttttacgtttgggagtgtatgtgtaggtaatatagtaatatataaaataaaggaagagaaataggggtatatgtaatttttatattggttaatttaatttttgagtagaaaaattttgaatatttttattaaaaatgagaaacggttaggcgcggtgttttaagtttgtaattttagtattttgggaggtcgaggcgggcggattacgatgttaggagattaagattattttggttaatacggtgaaatttcgtttgtattaaaaaaaaaatataaaaaattagtcgggcgtggtggcggtcgtttgtagttttagttgttcgggaggttgaggtaggagaatggtgcgaatttgggaggtggagtttgtagtgagtcgagatggcgttattgtattttagtttgggtgatagaatgagatttttttaggaaaaaaaaaaaagtgagaaatataggaaatataaaaaagaaaaaaatttgttataatttattattttaatataattattattagtattttgatatttttgtattttttttttaagtattttttaatatttattttttaatgaaatatatatattttttaattttttaatagagataggttggagtgtagtggtgagattatcgtagtttattgtaattttaaattttcgggtttaagtgatttttttgttttagttattttagtagttgggattataagtgtcgttaatttttaataattttttaattttttgtagagataggattttgttatgttgattaggttggttttaaatttttggttttaagcgatatttttaagttttggttttttaaagttttaggtttatagttatgagtttttatgtttagattgtatttgatttttttttttttttttttggagatagttttgttttgtcgtttaggttggagtgtagtggcgcgattttggtttattgtaagtttcgtttttcgggtttatgttatttttttgttttagtttttcgagtagttgggattataggcgtttattattacgttcggttagttttttgtatttttagtagagacggggttttattgtgttagttaggatggttttgattttttgattttgtgattcgttttatttagtattttaaagtgttgggattataagtgtgagttattgcgtttggtttatttgattttttgtattgtaacgatagtgtatatatatttatttatttattgagatagagttttgttttgtcgtttaggttggagtgtattgatttaatttcggtttattgtaattttcgttattttagtttaggttatttttttattttagttttttaagtagttgggatgataggcgtgtgcgttattatattcggttaatttttgtatttttagtagaggtagtgttttattatgttggttaggttggttttgaatttttggttttaggtgatttatttatttcggttttttaaagtgttggaattataggtgtgagttattgtgcgtggtttatagtttattttaaatatattataatttggtcgggtgtggtggtttatatttgtaattttaataaatatattgtaatttgtttgggtgtggtggtttacgtttgtaattttaatattttgggaggttgaggcgggtagattatttgaggttaggagttcgagattattttggttaatatggtaaaattttatttttattaaaaaatataaaagttagttgagtttgtggtggtatgtatttgtagttttagttgtttgggaggttgaggtacgagaattgtttgaatcggggaggtagaggttatagtgagttgagattgtaatattgtattttagtttgggtaatagagtgaaattttattttaaaaaaaataaaataggggtcgggcgcggtggtttatttttataattttagtattttgggaggtcgaggtaggtggattataaggtcgggagatagagattattttgattaatatggtgaaatttcgtttttattaaaaaaatataaaaaattagttaggcgtggtggtaggcgtttgtagttttagttattttggaggttgaggtaggagaatggcgtgaattcgggaggtagagtttgtagtgagttgagattgtattattgtattttagtttgggcgatagagtgagattttgttttaaaaaaataataataaaataaaaaataaggtcgggcgcggtggtttatatttgtaattttagtattttgagaggtcgaggcgggtggtttacgaggttaggatatcgagattattttggtaaatacggtgaaattttgtgtttattaaaaatataaaaaaatagttaggcgtggtggtaggcgtttgtagttttagttattcgggaggttgaggtaggagaatggcgtgaattcgggaggcggagtttgtagtgagtcgagattgcgttattgttttttagtttgggcgatagagcgagatttcgttttaaaaataaaataaaataaaataaaataggttaggtacggtggtttatgtttgtaattttagtatttttggaggttaaggtgggtagattatttgaggttaggagtttaagattagtttggttaatatggtgagattttgtttttattaaaaatataaaataagttaggcgtggtagcgtatgtttgtaattttgttatttaggaggttgaggcgggagaatcgtttgaatacgggaggtggaggttgcggtgagttaagatcgcgttatcgtatgtttaaggtttttgatatatattgttattttgttttttaggagatagttaattaaatttattaagaagtagtaggttatgtatagtggtttacggttgtaattttagtattttgggagtaggaggttgaggtaggttattatttgaggtcgggagtttgagattagtttgattaatatgatgaaattttatgtttattaaatatagaaaatttgttgggtatagtggtatatgttcgtaattttagttatttggagatgattagatattatatatttttttaggaaaaaatatgttatttatgataaagttatgttgaagaaagaaaatttgaattagattaagtttttttaggtttttagtaggaaggatagaggattttgttaatttatattaaaagaggttaatcggtaggttaggtaaggtggtttatgtttgtaattttaatattttgggaggttacggtagaggatcgtttaagtttagaagtttaaggttgtagtgagttatgattgcgttattgtattttagtttgtgtgagagaataagattgtttttaaaataattaatttaataattttatttttttatttgagatggaatttttgtcgttaggttggagtgtagtgattaatttcggttcgttgtaatttttgttttttaagtttaagtgatttttttgttttagtttttttagtagttggaattataggtatgcgttattatatatagttaattttttgtatttttagtagagatggcgttttattatgttgtttaggatggttttaattttttgattttgtgatttatatgtttcggtttttgaaggtgttgggattataggtatgagttatcgtgtttggttatttatttatttttattttttttgagacgggttttcgttttgttacgtaggttggagtgtagtggcgcgattttggtttattgtagtttttgcgttttagatttaagcgatttttttattttagtttttatagtagttgggattataggtatgcgttattatacgtagttaatttttgtatttttagtagagatggggttttattatgttgtttaggatggttttaattttttgttttcgtgatttatatgtttcggttttttaaagtgttgggattataggcgtgagttattgtgtttagttaaaataattttttattttttatttatttttttgagatagagttttgttttgtggtttaggttggagagtagtggtgtgatttttgttttttgtaatttttgttttttaggtttaagtgatttttttgttttagttttttgattagttgggattataggtgggtattattatatttggttaatgtttgtttgtttttttttttgttttttttttttgagatcgagttttattttgttatttaggttggagtgtagtggcgtgatttcggtttattggaagttttttttttcgggtttatgttatttttttgttttagtttttcgagtagttgggattgtaggtgtttattattacgtttagttaatttttttttgtatttttagtagagatagggttttatcgtattagttaggatggtttcgattttttgatttcgtgattcgcgcgtttcggttttttaaagtgttgggattataggtgtgagttattgcgtttagtttaatgtttgtatttttagtagatatagggtttaattatgttggttaggttggtttcgaatttttgattttaagtgattttttcgttttggttttttaaagtgttgggattataggtatgagttattgtgtttcgtttaattaatttttttaaaaaggtaattagtaaaatttagaatgtggaaaagtgtataatataaagtattttggttttttagaagataaattataagggaaaaaagagagggtatttgtagatgaagaggttttagaaaattaagttaaagttaatgtttagaaatgtaggtttgggtgataaaattataaagaaacgtaaggggtgggtgtgtggtagattatgtttataattttagtttttaggttagggcggggtggggtgcggtggtttacgtttataattttagtattttgggagtttgaggtgggtggattatttgaggtcgggagtttaagattaatttgggttaatatggtaaaattgcgtttttattaaaaatataaaattagttgggagtggtggcgggcgtttataattttagttagttgggaggttgaggtaggagaatcgtttgaatttgggagacggaggtcgtagtaagtcgagattgtgttattgtattttattttggtaatagagcgagatttcgttttaaaaaaaaaaaaaaaaaaaaatagaggtttggtggggaggattgtttgagtttagaagttttagattagtttgggtagtgtagtataatattatttttatagtaaatttaaaaaattagttggttatggtggtatatatttgtagttttagttgtttaggaggttgagttaggatgatggtttgagtttaggagttcgaggttgtagtgagttattatcgcgttattgtattttagtttgggtgatgggagtgtgattttattttagaaaaaaaagttaggatattgatttttttggggaggtgggtgttgtaattgggagggaatgtaagagggatttttggggtgtttggtaagatttaattttttgatataggtggagattttatggttgtttattttataataatttattaggttatatttttttttatggtttttatttattttatatggtaaataaatacgaaaataaggataaatatttttttttatttttttttttatagg

SEQ ID NO: 36 - DNA, 11131 bp, Artificial Sequence
  chemically treated genomic DNA (Homo sapiens)
tttatggggaaaaaaatggaagaaaatgtttgtttttgttttcgtatttgtttattatataagataaataaaggttataaaggaaagtataatttaataaattattataaggtgaataattataaaatttttatttatgttaggaaattgagttttgttagatattttagaaattttttttatatttttttttaattataatatttatttttttaaaaaagttaatattttgatttttttttttgagatagggttatatttttattatttaggttggagtgtagtgacgcgatgatagtttattgtaatttcgaatttttgggtttaagttattattttgatttagttttttgagtaattgggattataggtgtgtgttattatgattagttaattttttaagtttattgtagagatggtattgtgttatattgtttaggttgatttaaaatttttgagtttaggtaattttttttattaggtttttatttttttttttttttttttttgagacggagtttcgttttgttgttagggtggagtatagtggtataatttcggtttattacgattttcgttttttaggtttaagcgatttttttgttttagttttttaattagttgggattatagacgttcgttattatttttagttaattttgtatttttagtagagacgtagttttattatgttggtttaggttggttttgaattttcggttttaggtgatttatttattttagatttttaaagtgttaggattatagacgtgagttatcgtattttatttcgttttggtttaagagttgggattataggtatgatttattatatatttattttttacgtttttttataattttattatttaaatttatatttttaaatattagttttgatttaattttttaaagtttttttatttatagatattttttttttttttttttgtaatttattttttgaagagttaagatgttttgtgttatatatttttttatattttgaattttgttgattgtttttttaaaaaaattaattaggcggggtatagtggtttatgtttgtaattttaatattttgggagattaaggcgggaggattatttgagattaggagttcgagattagtttagttaatatggttaaattttgtgtttattgaaaatataaatattaggttgggcgtagtggtttatatttgtaattttagtattttgggaggtcgaggcgcgcggattacgaggttaggaggtcgagattattttagttaatacggtgaaattttgtttttgttaaaaatataaaaaaaaattagttgggcgtggtggtggatatttgtagttttagttattcgggaggttgaggtaggggaatggtatgaattcgggagggggagtttttagtgagtcgagattacgttattgtattttagtttaggtgatagagtgagattcggttttaaaaaaaaaaaataaaaaaaaaaataaataaatattagttaggtgtggtggtgtttatttgtaattttagttaattaggaggttgaggtaggagaattatttgaatttgggaggtagaggttgtagggagtagagattatattattattttttagtttgggttatagagtaagattttgttttaaaaaaataaataaaaaataaaaaattattttggttgggtatagtggtttacgtttgtaattttagtattttgggaggtcgaggtatgtggattacgaggataagagattgagattattttggataatatggtgaaattttatttttattaaaaatataaaaattagttgcgtgtagtggcgtatgtttgtaattttagttattatggaggttgaggtgggagaatcgtttgaatttgggacgtagaggttgtagtgagttaagatcgcgttattgtattttagtttgcgtgatagagcgagaattcgttttaaaaaaaataaaaataaataaatggttaagtacggtggtttatgtttgtaattttagtatttttagaggtcgagatatgtggattataaggttaagagattgagattattttggataatatggtgaaacgttatttttattaaaaatataaaaaattagttgtgtgtggtggcgtatgtttataattttagttattagggaggttgaggtaggagaattatttgaatttgggaggtagagattgtagcgagtcgagattagttattgtattttagtttggcgatagagattttattttaaataaaaaaataaaattattgaattaattattttagaaatagttttgtttttttatataggttggaatgtagtggcgtaattatagtttattgtagttttgaatttttgggtttgagcgattttttgtcgtggttttttaaagtattgggattataggtatgagttattttgtttggtttgtcgattgattttttttggtgtagattaatagagttttttgttttttttattaaggatttagagaggtttaatttgatttaggttttttttttttagtatgattttattataagtaatatatttttttttaaaaaggtatataatgtttggttatttttaagtagttgggattacgggtatgtgttattatgtttagtaaattttttgtatttagtagatatggggttttattatgttggttaggttggttttaaattttcgattttaggtgatagtttgttttagttttttatttttaaagtgttgagattatagtcgtgagttattgtgtatggtttgttgttttttaataagtttaattagttgttttttggagaataaaatggtaatgtgtgttaagaattttaaatatgcgatgacgcgattttggtttatcgtaatttttatttttcgtgtttaagcgattttttcgttttagttttttgagtagtaggattataggtatgcgttattacgtttggtttattttgtatttttagtagagataggattttattatgttggttaggttggttttgaatttttgattttaggtgatttgtttattttggtttttaaaaatgttgggattataggtatgagttatcgtgtttgatttattttattttattttattttatttttgagacggagtttcgttttgtcgtttaggttggagagtagtggcgtaatttcggtttattataagtttcgtttttcgggtttacgttatttttttgttttagtttttcgagtagttgggattataagcgtttgttattacgtttggttatttttttgtatttttagtagatatagggttttatcgtgtttgttaggatggtttcgatgttttgatttcgtgagttattcgtttcggttttttaaagtgttgggattataggtgtgagttatcgcgttcggttttattttttattttattattatttttttgagatagagttttattttgtcgtttaggttggagtgtagtgatgtaattttagtttattgtaagttttgtttttcgggtttacgttatttttttgttttagtttttagagtagttgggattataggcgtttgttattacgtttggttaattttttgtatttttttagtagagacggggttttattatgttagttaggatggtttttatttttcgattttgtgatttatttgtttcggttttttaaagtattgggattatagaggtgagttatcgcgttcggtttttattttattttttttgagatagagttttattttgttgtttagattggagtgtagtgttgtaattttagtttattgtagtttttgttttttcggtttaagtaattttcgtgttttagttttttaagtagttgagattataagtgtatgttattatagatttagttaatttttgtattttttagtagagatggggttttgttatgttggttagggtggtttcgaatttttgattttaagtgatttgttcgttttagttttttaaagtgttgggattataggcgtgagttattatatttagataaattatagtatatttattgagattataagtgtgagttattatattcggttaaattatggtatatttaaaatgagttataggttacgtatagtggtttatatttgtaattttagtattttgggaggtcgaggtgggtgaattatttaaggttaggagtttaagattagtttggttaatatggtgaaatattgtttttattaaaaatataaaaattagtcgagtgtggtggcgtatacgtttgttattttagttgtttgggaggttgagatgggagaatagtttgaattggggtggcggaggttgtagtgaatcgagattgagttagtgtattttagtttgggcgatagagtaagattttgttttaataaataaataaatgtatatgtattatcgttataatataagaaattagataggttaggcgtagtggtttatatttgtaattttagtattttgggatgttgagtagggcggattataaggttaggagattaagattattttggttaatatagtgaaatttcgtttttattaaaaatataaaaaattggtcgggcgtggtggtgggcgtttatggttttagttattcgggaggttgaggtaggagaatggtatgaattcgggaggcggagtttgtagtgagttaagatcgcgttattgtattttagtttgggcgatagagtaagattgtttttaaaaaaaaagaaaaagaaattagatatagtttgggtatggaggtttatgattataaatttagaattttgggaggttaaggtttgggggtatcgtttgaggttaagagtttgagattagtttgattaatatagtaagattttgtttttataaaaaattaagaaattattgggagttggcggtatttgtagttttagttattgaggtagttgaagtaggaggattatttgagttcgggagtttgaggttatagtgagttacgatgattttattattgtattttagtttgtttttattaaaaaattaaaaaatatatatattttattaggaaataaatattgaaagatatttgaaagaaaaatataaaaatgttaaaatgttggtagtggttgtgttagagtggtagattatagtaaattttttttttttttgtattttttatgttttttattttttttttttttttgagagagttttattttgttatttaggttggaatgtagtggcgttatttcggtttattgtaagttttattttttaggttcgtattatttttttgttttagtttttcgagtagttgggattataggcgatcgttattacgttcggttaattttttgtattttttttttagtatagacggggttttatcgtgttaattaggatggttttgattttttgatatcgtgattcgttcgtttcggttttttaaagtgttgggattataggtttgagatatcgcgtttggtcgttttttatttttaataaaaatatttaaaatttttttgtttaggagttaaattaattagtatgaagattatatgtatttttatttttttttttttgttttatgtgttattgtgttgtttgtatatatatttttaaacgtggaggttatagtgagggaattaattatttttttgtaattgtgttgtttgcgtttattttttggttggtgtagttattgtagggtgggggtatttttatattgaggttttggaatggtaatattatttttttggatgagaagggttttatttgaattatttaagatgataaaaaatatttatggttatggttatttattagggattaaaagatgttaaattattagtgtttaaaaaaaatttagggtatattagagtaagatttgtatataagagtttagggtagttttgcgaagtttaaaggaagaaaagaattttagaattatttgggaggagaagggtaggttattaaatagtaaagtttatttagtagagataggtagggaaggttttttttttatatatcgaatggtattatatgttgaagttatttattatttgttttaaggttttttttttgttttttttttgtttttttatcgttttcggttttgtaatatgatttttattttgatatgttggttattgtttattaggcgaaagacgttaacgttagtaataggtaaatttaaatcgaaaaaatatcgatttttaggtttttgtgagatttgttttaaaagtttggttagtagtgaggaatgtggacggtaaattttgttgtttcgaaagttcggtagtcggattgtatgtaaatgcgtatgggggttattttagtagttgttttattttagttattttttacgttttagggtcggcggcggttcgcggaagttagatttcggaggtttcgttttcgacgttatttagacggtgagggattttcgttttaggattttatgttgattaacggattttttcgtttttaatatcgtttaaaaatttttttaaattttttaattacgtttaatgagattttaaacgtagataggttttaagcgtaggcgggtcgtaagcgtaggcgggttttaaacgtaggcgggttttaaacgcgaggtgtcgtttttttttcgaggaaggagcgtggtttcgagtttgtcgttgtttttcggattcgtatatttaaggttaacgttaattttttagtaaggttatgggggcgcgcgagatcgatcgagcgaagcgggacgaggttaggtttagttggcgaataatataaatggataacggttcgtttatttttggcgtagggaagcgattaatttggatagaagacgataatttacgtatgcgcgggttttgtattcggttttaattaacgttttttacgttattacgtatgtgcgtattatatcgcgttaggttggtacgtatattttttaattagtttttatttatgtttttgacgaaagttaatttattagcgagagtttcgtttttttcggtaaagtttcgtttttttttacgttaggattgtaagtatatgcgtaaaagtgtatttttgttttcgttttttttttcgtgtgggttttttttgttttttttttgttattttatagtagtcgttgtcggtagcgggtgtgggggcgcgagtagcgtagggcggttttttttttattttttagttcgggttcgggttcggttttttttttttttttcgtttcgtattttcgtcgggtacgggaaggtttaagtcgttgtcgggtgttcgagggtcgtcgtggtcgtcgtcgttacgggttttaatggagtcgtcgaatttttattcggtgaagttttacgtgtacgatttgtttaaaggtttggttcggcggtttagttttattatgttgggtgagggggaaggggttaggtgggtaggagggcgggagttaggttagagggtggcggttggtcgaggtggggagatttgggttacgatttacggggagatatatggttaggaggatggaagaaaagtcgagtggagaagagagtggtttgaagtttgggttatttgagtttcgttttagtttcgtagatattatttttacgtttgaatttaaggggaagggatggaggagttatgtttttattttgtagggggtttgggtagaaatcgagttttcgagagttttttcgacgagggtgtggggtaaattagcgttggatttcggcgggttttttgtttcgttcgggtagtttagtgtatttttgtttttttggcgcggtgtaggaaaggtgaggatgtttgtcgcgcggtgtttttcgtggtgatagagatattgcggaggtcgggtggttttcggagaattttgttttagtgttaaaaggaagttttttttgtagttttagggataggtgggatgggggagatagagttgtttagggatttagttatcgtttttaggtaggttaagttaggataagaggagtttcgaattttagaatttattaagtagttttttttttatagtttttaagttaattgtttttgtttaaatggtaagaaagtagttttgggggaagtttggatgaggttgtgtgaataaggattagtaaagaaagtatttcggttgtgttttattaaattatttaattggtaggagaaaaattagtttttatttagtgacgattatattttattttaatttaaatataggaatgttttgtgtaatataggaattgttaggtttgtaatttcgggtaataatgagtaggaaagaattttaattattgaaaattgaagttttgatagtatttatttgaatggttagttttttttggtttttgtggagatattggcgaatgatttagtttatttttgtgagacgagggggtagagattaagtaagggaggttatttttgagggtattttttaatgtttttgagtttttaatatgtcgtagtgaattgaatttaattttataatcgtgggtttatgagttgtttttatatttggttttatattaaaattatttagggtgtttgttaaaaatgtagatatttttatttttaatatatattgtaaatgagattagaaaaaataaggttagaatagttttttaaatatgtaaattaaaggatatatatgtgtttgtttaggtaaataattattcgtaaggatatataagaaattgataatagtagtagtttatggaaaggggaatttgatgttaggggaataggggtagaagagaaattttgttgtaaattgttttttatttttggatttgtgtattatatatatataatatttatttaaaatgagaaaattttaattatatggattttaaggttttataaatattaaattagaattttttggagttttggtttaaaaatttgtatttttaatgagtttattagttaatttttatgtagttaatttattatttgatagggatttgggtttagataattagttgttaaaatgattgaggtatatttgaaagtaaaatttataaagttattgaggaagttgttatttattaatagattatattagttaagtgttttttttttgttggtttttttttttgagacggagtttcgttttgttatttatgttggagtgtagtggtacgatttaggtttattgtaagtttcgtttttcgggtttacgttatttttttgttttagtttttcgagtagttgggattataggcgttcgttattatagtcggttaattttttgtatttttagtatagacggggttttattgtgttagttaggatggtttcgatttttttattttgtgattcgtttgttttggttttttaacgtgttgggattataggcgttagttattatgtttagtttatattagttaagttttaattaaattttttggaatggagttatttagttgtttgtttttttattatagtgaggaattagatattttttatattttacgtaaaatttttttttttatattgggtattttttattttattatttaataattattgggtagttgaaaggagttttaggagttattattttatttatttagtagatgtttattgagcgtttgttttatgttagttaacgtgttaaggtaaatgaggttgatataatgaataaagatgttttttgttattatggagttatttaatgggggagatattaaaaataaatatataaataattagttataaattgtataagtgttttttgtataggaagtatattgggtgttgtgatagaaaataataagagagattttttttttttttttagacgagttttgttttgttgtttaggttggagtgtagtggggtgattttagtttattgtaatttttgttttttaggtttaagtgatttttttgttttagtttttagagtagttgggattataggcgtatgttattatatttggttgatttttatatttttagtagagatagggttttattatgtttgttaggttggttttgaatttttgattttaagtgattcgttcgttttagttttttaaagtgttaggattataggtatgagttattgtatttagtgaagagatttattttaaataagggtattaagggtagtgattttgaaagtgggaatttaggatgaggaagaagtagttataggagggtagtaagggagtaatagtgttttaggtaggagaaagattaatttgttaaagttttgagataggaaagagtttggtttgatattggaattgaaagaaggtttttgtggagtgtagtgggtgaaggggaaagtgttgtaattgaagatggagtaatagatttgttttttttttatttttcgtttttttatatagatgtaaagttttggaatgttttagttaaatatgggaatattatttatttattgggtatattagattttgatttgaggaaattattttgtgtgttaatttatttttgttttttttattttttttttttatattgtttttatattttttgtaaaattaatgaagaaagaattagtaaagttagtagttattattttttagagttgaatatttaaggaaaataggtatggttttattgatttattttatttagataatataaattttgaagttgggtatgttttagtgttataagtagttatatattgattttttatttttaaatatatttgaatttttaaaaaattaatttgttttttgatttttatgatgaattttagaagtatattaatagttattatttattgagagtttattatgtgttagattttttttttttgagtattttgcgtgtattataatttttattataattttgtgagataagttttgttattgtttttatttttttgattgaagaatttgagaagtagagtgttaaggaatttgttttaggttttagagttattaggtggtagagttgggttatgaatataggtagtttgatttttagagttcgcgttttttgttattttgagatattatttttgtgtaatacgtttttttaaaattgaagtaaagtagatgtttttttgaagtttgtaaaggtattttttgttaaatgttttaagtttggatgagaaaaaaagttgggtttaatgtgtatgtgttatttataatttagatttatgattatgttttttagtttttattttttta

SEQ ID NO: 37 - DNA, 12781 bp, Artificial Sequence
  chemically treated genomic DNA (Homo sapiens)
tattatgttgttagttggttttgaatttttggttttaagttatttttttgttttggttttttaaagtgttgggattgtaagtgtgagttattgtttttggttagttggtgatttatttgtataattgtttaatttattgaatacgtatggcgtgttaagtattgggttgagggttttataatgtttttttatttaatgtttagtataatttatgaagaaggtagtgttaatattatttttgttttatagatgtagaaattgaggtataggttaaataatttgtttaataagttcgtgtagtttagtaagtagtttagttgggatgtgaatataaattttgaatatagagtttttaattagtaggttagaggtttttaaatatttagtatatttattattttagtatttttttgttatattttttaggttaaaataattttattgattgttatgtaatttattaagtgtagttatttgaaaaaaaaatatatataaaagaaaaatatttttatttagtttttaaaataatttatatatagttatggaatgtatgtgttggttgggtattgtagattaaagatagtttagggtcgggtacggtggtttaggtttgtaattttagtattttgggaggttaagtagagagaagggtttgagtttaagagttggagatcggtttgggtaatatagtaagatttagtttttatagaaaataaaattattagggtgtgaggacgtatatttgtagttttagttgtttgggaggttgaggttggaggattagtttgggtaatagagtgagattttgttttagaaaaaaaaaaaaaaaaagatagatttttatttagatatgtatgtaggagtttatagaaaaaaaaagtgagtttaggaggttgttatttggtatttatataatttttttttttttgaatttcgaaatttattttatatatattatttaataggggaagaggagggagaaaaagttttttatgggaagaataaataggtttttgggggaataaaagggagataagaatgtttgtttttgtaggtgtaagtggtttttgtttttttttttggttattaaaatttttttagagaggagatttacggtagttttatttttagaaatttttgttgttagtcgtataagggaagttttgaaacggtatttttttgtatttgttggtttttaaatgtttttagttttaagtaatatttatgttaattttgggggtttgagtgtttttatataatatatgtgtttttttgttttttaatgaagtttgtgggaggtatttaattgtagtttttaaaatttggtttataggtattattgtttttattaaagacgaggaaataagtttagaaaagtattaattgtttcgagttatttgtttggttagttaggattagagtttagttttttatttaatttaaagtttaggtttttaattttttataattggcgtattttttttgaatttttattttttttttgtaaaagaataatatcggtcgggcgtagtggtttatatttataattttagtattttgggaggtagagatgggcggattacgaggttaggagtttgagattagtttggttaatatggtgaaattttatttttattaaaaatataaaatttagttgggtgtgttggtgtttgtaattttagttatttaggagattgaggtaggagaattgttttaatttgggaggcggaggttgtggtgagttaagatcgtgttattgtattttagtttcggtgatagagtaagattttatttttaaaaaaataaataataataataaaaagagaataacgttatatttagttgaattaaaatgaattaaatattaatatttgtattttaaaaacggtttagtttggttgggcgtagtggttttcgtttgtaattttaatattttgggaggtcgaggtaggaggattatttgaggttaggagtttgagattagtttggttaatatggtgaaattttgtttttattaaaaatataaaaattagttgggtagtagtagcgcgtgtcggtaattttagttatttaggaggttgaggaaggagaattgtttgagtttgggaggtgaaagttgtggtgagttgagattgtattattgtatattagtttgggagatagagtaagattttgttttaaaataaaataattaaaaaattaaaaaggtttagtttgggtaatatagtgaaatttcgtttttatagaaaatttttaaaatattagtagggtatcgggtatagtggtttatatttgtaattttagtattttgggaggttgaggtaggcgggttatttgtggttaggagtttgggattaggtaggttaatatggtgaaatcgtgtttttattaaaaaataaaaattagttgggtatggtggtaggtattagtaattttagtatttaggaggttgaggtatgagaattgtttgaattcgtaaagtaggggttgtagtgaattaagatggcgttattgtattttagtttgggtgatagaataagattttttaattaaaaaaaaaaaaaattagttgggtatggtgttgcgggtttgtggttttaggtatttaggaggttgaggtgagaggattatttaagtttgggaggttgaggttatagtaagttaagattacgttattatattttagtttttgtgatagagttagattttgttttaaaaaaattttaaaaagggtaaattttggtaattttatatagtttaatttagtataaggtggttgtaataattaaatgagataaaatggtgttaaattggaagtattatagtatttttgttaataatatagggttttagaattagtttttttgagtttaaatttaggttttattattttttagttatgtagttatgggtaagttatttgatttaattgtgttttagttttatttatgatatggagatataggataattagttttttacgtgtaattttgaaatttaaaaagttttgtaaattaaaagtttgggggtaaatttatttggtagtaaattttgatttgaggttatttatagtttatattttgtattttttttatttagtatgaataagtatgtaagttttattgtatgtttgattttagtatgtttttttagattttttgggggtgtttacgtatgtcggtgggggaaagagattaatttttaaatattattttaaatagttggttttattgtgtttgtttgggtagtatatatattaaaattggaatgatttttgtatagggatgaaatgtaaattcgtgaagtatattgtattttttttagtatatattatttttggtaatattttttttttttttttgagagggagttttgttttgtcgtttaggttggagtgtagaggcgcgatttcggtttattgtaagtttcgtttttcgggtttatattatttttttattttagtttttttagtagttgggattataggcgtgtgttattacgttaggttaattttttgtatttttagtagaggcggggttttattgtgttagttaggatggtttcgattttttgatttcgtgattcgtttattttcgtttttttttcgaagtgtcgagtgttgggattataggcgtgagttattgcgttcggttttcgttttttttttttagattgattttattatttgtttagtaaaggagaattttttggtagaatagtttttaagaataaggtaaataattaattttatataggtttttattaatgtatagttgttgattgtgattggttttcggtaatttggattttataatttggataaggggataaataattgtttgttttttattattttttttgaatttgaatagaatttttttatttttatagttttttagtttttttttttttttttttgagacggagtttcgtttttgtcgtttaggttggagtgtagtggcgcgattttggtttattgtaaacgttgttttttaggtttaagttatttttttgttttagttttttaagtagttgggattataggcgtatgttattacgttcggttaatttttggatttttagtagagacgggggttttattatgttgattaggttggtttttaacgtttgattttaggtgattcgttcgtttcggtattttaaagtgttgggattataggcgtgagttattgcgttcggttttttatagttttttagttttttaaaatttgaaaaattttgtaaagatatatttgggttaaagggtttagataacggattgtggtttttaagtatttacgttataggttattgagaggatcgatttagttattagatgtaaaatgttgggattagtgtttggtaaaggaaaattttgtatagttgtaggtttttattatatataatagtatcgttaacgaatgttattataatatttatttagcgtttattaagtgtttattttatataaattttgagaatataacgtgaaggtgaattgttgattaaagtttggtttttttcgtttcgtttttttgcgaaaatgttttaacggtaggaggttacgcgagcgttggacgcgttttttttcgcgagttttttttcgaggtttttcgggttttttcggttattttcgttcgggcggtgcgcgttttcgttgttttcgttttcgttttagagaggtagggtttttcgagtttgttagtttcgcggtcgtaattaatttcgggtcggagtgtttcggttcggttagtttcgcggcgtgagggaaggggagtttagtagtttttcgcgcggggtttaggcgtcggcggtagggcgggttttttatcgttagcgtgttagtttcgtttttatttattagtgtgttagtttcgtttttttttacgtcgtcgcgcgttcgggggcggggtttggcgcgtatcgttcgcgtacggcgaggcgtttgttgattggttattggggttcgggttttttcggcggagcgcgtttttttttagatttttcgttagtaggagtcgcgcggtagatgcggtgtttttaggagtttcgttcgatagaacggttgggttttgtcggttgtcggtatgtcgcgatagagtattttgtatagttttttttttaagttttcggcgttgagtgatgttaataaggtttcggttagggttttacgcgaaggcggtcgtgtcgtcgttgttttcggggtttttttttttttaggcggggatgcggtttggagcgaggttgggtttgggtttaggtttttggcgcgtttcgcgttatcgtttaaggcgaagaattttaacggagggttgcggagatcggtagcgtttgttgtttttattaggtagcggggtgggggtggggtcgaaggcgggggtatagcggcggggcgtttggaattcggcgaggggaggttcgtatagggggttgggggggtgtacggtttggttttgggttcggaggaggcggggtcgtagagttggtttgaatgagtgtaggggtcgagtttggagtatttgggggtgtagtttgtaaatagggtcggaggagagaggttgtgtaggaagagggttgtaggggagacgcggagagttcgggttttttggagggaggagacgcgtttcgttaggtgggggtgttgggttaaggaaggggcgacgcgcgtagtttcgggtggggagggggtttgggaggtgggagtattgggggtggggcgagaaggggaaggcgttcggtttatttggtgggcggggcggggggcggggtggcgggaaggaggaatgtttgcgggaggtcgaacggggagagttcggtggtgtggggtgcgaaaggaggtttttcggtcggcgcggagatagtgagttggggttttagtagtcgatcgaggtagatatttagaggtagttaagagtcgcggtcgtcgagacgttttggggacggtgggttttcggtttaggtgaggggtcgtcgagggggtgggttacgagttgcgagcgcgggggggtgtgttattatggggatcgcggggtttaattgggcggggcggggtcgtggggagtcgaagtgttgggattcggttgggtttttcggtaggtaggttgtacgtgtatcgagacgaagatagaatattttgacgtatgtggaaattcgtgtcgagtggaaaatattttattttatgaaatagtgtaatttttatggggtattattgggtttttagaggttttaatcgggcgttggataaagatgtgtggacgtgagtgatttcggggaagtttgtcgggagttgtttttattttatgggtagttaagtgttttttttttttttttttttttgagagagagtttcgtttaagtttaggttggagtgtaatggcgcgattttagtttatcgtaattttcgcgtttcggttttaagcgattttttagttttagtttttcgagtagtcgggattataggaatgcgtttttatatttcgttaattttgtatttttagtagagacggggtttttttatgttggttaggttagtttcggaattttcgattttaggtgatttattcgtttcggttttaaagtgttgggattataggcgttagttatcgcgttcggtttgtttagggttttttattcgggtagttggcgatattttgaaaagtttgtttttgttgtttgttagatatatatatatgtattttgagatagagttttgtttttttgtttaggttagagtgtagtggcgcgtttttggtttattataatttttgtttttggattaagagattattttgttttagttttttaagtagttgggattataggtgcgttttattacgtttggttaatttttgtatttttagtagagacgggttttattatgttggttaggttggtatcgaatttttgattttttgatcggttcgtattggtttattaaagtgttgggattataggtatgaattatcgagttcggtcgtttgttagatattaaatataaagtttaatggtcgttatttgaataaacgaagaaataaaggtttagaaaaaataatttatttaagataagagttagttcgtgttttttgtttggttttgttttgaaatggagtttcgttttgtcgtttaggttggagtgttgtggcgttttttcggtttattgtaatttttgttcgtcgggtttaagtgatttttttgttttagtttttcgagtagttgggattacgggtgtgtttatcgcggttcggttgattttttattatggagttttattatgttggttaggttggttttgaaattgttgattttaagtggtttatttattttagttttttaaagtgttgggattataggtgtgagttatcgtgttcggtcgttagttagtggttttgagtaatggattttaaatttatttaaatttagtttaaagtgttttaaaggaattttgagatttttttaagtgtaattatagtgttatttttgtttaagcgattttttttcgtagtttaaatatatatagttgtgtattagtagaatatgtttgtggggaatagagttagtattcgtaataataaatttttggttagaaaagtatgacgtattgtttatttgagtatgaattgattgttgaatttaaattaaacgggtgtatttattgtaaggatgtattttatatttatattgaatagcgtatgttatttgttttttgaggttgagtttaagagatttgtaaaaataaaacgtatatattttatttttcgttatggagaggattttagggtatttaagaaagatgggtatttgatattaggtttttaaagaaattgtagtgtttagattattttgtcgagtatagtattaggtattatggattttggatataattatgaataggataaagtaaagaggtaattgtagattttaagtggaaaggggacggagaggatgcgggttaggttaggtttttagttttgtaaatcgaaattagaaggataaataagtttagatagattatagtgagagtgggaagttggtttaggaagaggaaggtttgtaaattgtgggtaggatgaaaggaggaggagggagtattggagaagttaagtagagatttaattatgaatagtttgatgagttatagagatattcggatttattttatgaattatttaagttttaaaatatgttgagcgtattttttttttttttgagacggaattttatttttgttgtttaagttggagtgtagtggtgtggttttagtttattgtaattttcgttttttgggttttagcgatttttttgttttatttttttaagtatttggtattataggtgtttgttattacgtttagttaatttttgtgtttatagtagagacgggttttattatgttggttaggttagtcgtgaatttttgattttaggtgatttatttattttagttttttaaagtgttgggattataggcgtgaattatcgtatttggtcgtgagttatcgtgtttgttcgagtattttttaatgtttgttatttagatttttttttgtgttgaagtgtttgttttttgttgtttttttttttttttttagttttttgttatttgtgtgtgatataaatgtttttttttataatgagtttttttatttagtttatggttttgttgttgttgttgaataatagaggttttattttgttgtttaggttggtgttgaatttttgtttttaagcgatttttttattttagttttttaatttgttgggattataagtgtgagttattatatttagttttatggtatttttcgatgaataaattattgattataatgtggaatttgtttttttattttttttgtggttagtgtttttataggttttatttaagaaatttatagggaggttgggtgtagtggtttatgtttgtaaatttaatattttgggaggttaaggtaggttaatatggttagattttgtttttttaaaaaataagaaaattagttaggtatggtggcgtgtgtttgtagttttagttttttgggagattgagatgggaggatcgtttgagtttaggaggttgaggttgtagtaagttaagagattatgttatgtattttagtttgggtggtagagttagattttgtttgttaaaaaataaaataaaagttggtgaaaatgttgattatatattttaggaataattagtaattgatattaaaattatgggttaaagagaaagtaaaaataatgtgattttaaattagaatttaaaagatttgtttagcgtatgtttagataaagttattatttattatattaaagttttaatatttattttgtgagttgttagtttttttttttaatatttttttttatcgttttaaaaaattttaagaatatcggatatttaagatttatttaaagttttaaaagtatttgtaaaattttaaaattataatttaaggtgtttttggagggtaggagtaatggtggtaggtagtgttttgttttgttgtttaggttgaagtatagtggtagatttcggtttattgtattttcgatttattcggtttaagtgatttttttattttagttttttgagtagttgggattttaagtgtatattattttatgtttggttaatttttaaatttttttgtagaaataaggttttattgtgtagtttagatggtttcgaatttttgggtttttaagagatttttttaaagtgttgggattataggtgtgagttattatatttggtttattttggtatttttgaaaatcgtaggattattacggataaaattttaaaattatttttaaagaatttaggtttatatataaaaaaaatttggtttgttagtagtgagtgaagaaaaattttgagaaatgtttaaaatttttagttttgttatataatatattttattatttgtttaattattttttttgatttagaaattagttttttgggtttaggatgtttagtggtattttttttttttaagttttttagtattggaggaattgtatattagtaaaatttttagttttagtattttatagtttattgttatttttttttttttatttttttttttttttttttttttttttttttttttttgagatggagtttcgttttgttatttaggttggagtgtagtggtacgatttcggtttattgtaatttttgttttttaggtttaaatgatttttttgttttagtttttcgagtagttgggattatagatgttcgttattatgtttagttaatttttatttttttagtagagatggggttttattatgttggttaggttagtttcgaatttttgatttcgtgattaattcgttttggttttttaaagtgttgggattataggcgtgagttatcgtgtttagtttttttttttttttttttttttttttttttttttttgagacggagttttgttttgttatttaggttggagtgtagtggtatgatttgggtttattgtaatttttatttttcgggtttaagggagttttttgttttagtttttcgagtagttgggattataggcgtttgttattatgtttagttaatttttgtatttttttagtagagatggggtttcgttatgttggttaggttggttttgaatttttgattttaggtgatttgtttgtttcgtttttttaaaatgttgggattataggagtgagttattgcgttcggtttagtatattgttatttttttttttttttttttttttttttttttttttttgtttttttttttttttttttttttttgtgagacggagtttgtcgtttaggttggaatgtagtggcgtttttttggtttattgtaatttttgttgttcgggtttaagtgatttttttgttttaggtttttaagtagttgggattataggtttttgttattgtatttggttaatttttgtatttttggtagagacggggttttattattttggttaggttggttttgaatttttgatttcgtgatttatttgttttggttttttaaagtgttgggattatagatttgagttatcgtattcggtttatattgttattttttaatagtagagaaattatgtgttagattttgtaagtgtaatggtatataaaggataaaatgatgttgaaaaataaaattttttgtttaaatgtttatgtttttaatattttattttagaaaggaatttattttaaaattgataatggttggatttagttttttatataaattttttttttttagtgaggatgtatatttattttgtaaataaatggaagatattatttttttaattgtttgtttagaaatgaaataatttttttttaatgattttttaaagtatgagattttatatattatttaaaataatttatattgtattttatatatgataaagttttaaggtaatagtttttttttaagattaaagttatagttttttttttgtatttgagggggattggttgtaggatttttttgtgaatatttaaatttttggatgtttaagttttttatgagatgtagtatttgtatataatttatatatatttttttttgtattttatttttagattacgtataatatttaatagaatgtaaatgttttgaaattagttgtttagttgtattttaaattttgtatttttttttttttttttttgagatagagttttgttttgttgtttaggttggagtatagtatagtgattatagtttattgtatttttaattttttaggtttaagttgttttgtttcggtttttttaagtgttgggattataggtgtgagttattatatttggttattgttttttattggttttaaatttttgatttaaaatttttaatttaggttggttgaatttggattggaatttaaggatatgtttgttgagtatattgtatttattttggaatataattagaatgtttaatttgtatgttaaaaatattttatttggttaggcgcggtggtttacgtttgtaattttagtattttgagaggttaaggcgggtgaattatttgaggttaggagtttaagacgagtttggttaatatggtaaaattttgattttataaaaaaaaggtaaaaataagttaggtgtgatggcgtgtgtttgtagttttggttatttaggaggttgagatataagaatcgtttgaatcggggaggtacgttacgtttttagttgttgatttgagttttttcgtagtttgtagggggagggtaatagagtattaggtagtttttggaatatataggagtgtaattggaaaaagattttaagtaagtttaatgaattagataatttatttaattagtaaattatgtaattagtatgttttataataatattgtgagttagattttgtttttgatatgtatatattatattgtataggtgttattaatttggagagtatatatagtgagtttatgttttttttttgttattagtattatattaaaattttgttatggtttttaaattttgattttgagaaagttttttattttaataatataattatatttgtgtttgtttttatagttaaatatgtattatgatattagtttgtatatattttttaaatgatttgaatatttgattttaaaaattattttagaatttttgtgttttaatattaatgttagaagatttggaattgtttatttgtaggtaattgtttttaaggaaatttgattaaatattaattaagttatgtatttttttttggtaatagt

SEQ ID NO: 38 - DNA, 12781 bp, Artificial Sequence
  chemically treated genomic DNA (Homo sapiens)
attgttgttaaaaggaaatatataatttagttaatatttggttaagtttttttaaaggtagttatttataaataaataattttaagttttttggtattaatattgaagtatagaaattttagaataatttttaaagttagatatttaagttatttaaaaaatgtatgtaagttgatattataatgtatatttaattatgaagataaatataaatatagttatgttattagggtgagaaatttttttagaattaaagtttaaaaattatggtagaattttggtataatgttgatggtaggaaaaaggtatggatttattgtatatgttttttaaattagtagtatttatataatatggtatgtatatattagaaataggatttaatttataatattattataaagtatattgattatataatttattaattaggtaaattatttaatttattagatttgtttggaatttttttttagttatatttttatgtattttaaaagttatttaatattttattattttttttttataaattacggaaaaatttaagttaataattgagggcgtaacgtgttttttcggtttaagcgatttttgtgttttagttttttgaatagttaagattataggtatacgttattatatttggtttatttttattttttttttgtagagttagggttttgttatgttggttaggttcgttttaaatttttgattttaaatgatttattcgttttggttttttaaagtgttgggattataggcgtgagttatcgcgtttggttaaataaagtatttttaatatataagttaagtattttagttgtattttaaagtaaatatagtatgtttaataaatatatttttgggttttagtttagatttaattaatttagattaaaaattttaaattaaaaatttaaaattaataaaaaatagtgattaggtatgatggtttatatttgtaattttaatatttggggaggtcgaggtaggatagtttgagtttgggaggttaaaggtgtagtgagttgtgattattgtattgtattttagtttgggtaatagagtaagattttgttttaaaaaaaaaggaaaaaaaatataaaatttaaaatatagttgaataattaattttaaagtatttatattttattaggtattgtacgtaatttagagataaagtataggggaagatgtgtataggttatatgtaaatattatattttataagggatttggatatttaaggatttgggtatttataggggggttttgtaattaattttttttagatataaagggaggattgtaattttagttttagaaaagggttgttattttagaattttgttatgtgtaaaatatagtataaattgttttaaatgatgtatgaggttttatgttttaaaagattattagaaaagaattattttatttttaagtaagtaattaaaaaaataatgttttttatttgtttataggataaatgtgtatttttattaggaaaaaaaagtttgtgtgaaaagttggatttaattattattagttttgaaataaatttttttttgaaataaaatattagaaatataagtatttaaataaaaaattttgttttttaatattattttattttttatatattattatatttatagaatttgatatataatttttttgttgttaagaaatagtagtatgggtcgggtgcggtggtttaggtttgtaattttagtattttgggaggttaaggtaggtggattacgaggttaggagtttaagattagtttggttaagatggtgaaatttcgtttttattaaaaatataaaaattagttaagtgtagtggtagaggtttataattttagttatttgggagtttgaagtaggagaattatttgaattcgggtagtagaggttgtagtgagttaagaaaacgttattgtattttagtttggacgatagatttcgttttataaaaaaaaaaaaaaaaaaaaaaaaataaaaaaaaaaaaaaggaagaagaaagaaagaaagaaatagtagtatgttgggtcgggcgtagtggtttatttttataattttagtattttgggaggacgaggtaggtagattatttgaggttaggagtttaagattagtttggttaatatggcgaaattttatttttattaaaaaaatataaaaattagttgggtatggtggtaggcgtttgtaattttagttattcgggaggttgaagtaggagatttttttgaattcgggaggtggaggttgtagtgagtttagattatgttattatattttagtttgggtaatagagtaagatttcgttttaaaaaaaaaaaaaaaaagaaaaagaaaaagaaaaaggttgggtacggtggtttacgtttgtaattttagtattttgaaaggttaaggcgggttgattacgaggttaggagttcgagattggtttggttaatatggtgaaattttatttttattaaaaaaataaaaattagttgggtatggtggcgggtatttgtaattttagttattcgggaggttgaagtaggagaattatttgaatttggaaggtagaggttgtagtaagtcgagatcgtgttattgtattttagtttgggtgatagggcgagattttattttaaaaaaaaaaaaaaaaaaaaaaaaaagaaagaaagaatgaaagaaaagaaatagtagtaagttataaaatgttaagattaaaaattttattaatatgtagtttttttaatgttaaaaagtttgaagaaaaagagtattattaaatattttggatttaggaaattggtttttgagttaaaaaagataattaaataggtagtaaaatgtattgtgtaataaaattaaaaattttaaatattttttaaaatttttttttatttattgttaataaattaaattttttttgtgtgtaaatttgaattttttaaaggtaattttaaaattttattcgtggtaattttgcggtttttaagaatgttaaaataggttaggtgtggtggtttatatttatgattttagtattttgggaggattttttaagagtttaggaattcgagattatttgggttatatagtgagattttgtttttataaaaaaatttaaaaattagttaggtatggggtggtgtgtatttggggttttagttatttagaaagttgaggtgggaggattatttgagtcgaataggtcgagggtgtagtgaatcgagatttgttattgtattttagtttgggtaataaagtaaaatattgtttgttattattgtttttgttttttaaaaatattttaaattatgattttaggattttgtaagtgtttttaaagttttaagtgagttttaaatgttcggtatttttggggttttttaagacggtggggaaaaatgttaagaggaaaagttgatagtttataaaataaatgttaaaattttgatataataagtaatggttttgtttaaatatacgttaaatagattttttgaattttggtttaaaattatattatttttgttttttttttagtttataattttgatgttaattattagttgtttttaaaatatataattaatatttttattaatttttattttattttttggtagatagggtttgattttgttatttaggttggagtgtatggtatgattttttggtttattgtagttttaattttttggatttaagcgatttttttattttagttttttaagaagttgggattataggtatacgttattatgtttggttaatttttttattttttggagagatagggtttagttatgttggtttgttttggttttttaaagtgttgggtttataggtatgagttattgtatttagtttttttgtggattttttaaataaaatttatagaaatattaattatagagaaaataaaaggataaattttatattataattaataatttgtttatcgaaagatgttataaggttgggtgtggtggtttatatttgtaattttaataggttgggaggttgaagtgggaggatcgtttgagagtaagagtttaatattagtttgggtaataaagtgagatttttattatttaataataataataaagttataaattaaatgaaagaatttattgtgaaagaagatatttatattatatataaatgataaagaattaggaaaaaaaaaagaaatagtaaaagataaatattttagtataagaagaaatttaaatgataaatattaaaagatgttcggatagatacggtggtttacggttaggtgcggtggtttacgtttgtaattttaatattttgggaggttgaggtgggtggattatttgaggttaggagtttacgattggtttgattaatatggtgaaattcgtttttattataaatataaaaattagttgggcgtggtggtaggtatttgtaatattaggtatttgagaggatgaggtaggagaatcgttggaatttaggaggcggaggttgtagtgagttgagattatattattgtattttagtttgggtaataagagtgaaatttcgttttaaaaaaaaaaaaaatacgtttaatatgttttaaggtttaaatgatttatggagtaagttcgaatgtttttgtagtttattagattgtttatgattggatttttgtttaatttttttaatgttttttttttttttttttattttatttataatttgtagatttttttttttttgaattagttttttatttttattataatttgtttaagtttatttgtttttttggtttcggtttatagagttgagagtttagtttgattcgtatttttttcgttttttttttatttggagtttataattgtttttttgttttgttttgtttatggttgtatttaggatttataatgtttaatgttgtgttcggtagagtgatttagatattgtagtttttttagaaatttagtattaaatgtttattttttttgaatattttggaattttttttataacgggaggtgaaatgtatacgttttatttttataagttttttaaatttaattttaagaaataaataatatacgttatttaatatgaatgtaaagtatatttttataataaatatattcgtttggtttggatttaataattaatttatgtttaagtaaataatacgttatgtttttttaattaggagtttgttattgcggatgttggttttgttttttataagtatattttattaatgtataattatatatatttaaattgcgggaaagggtcgtttaaataagggtaatattataattatatttagaaaaattttagaatttttttaggatattttaaattggatttaaatggatttgaaatttattatttaaaattattaattagcggtcgggtacggtggtttatatttgtaattttagtattttgggaggttgaagtgggtggattatttgaggttagtagttttaagattagtttggttaatatggtgaaattttatggtgaaaaattagtcggatcgcggtgggtatattcgtaattttagttattcgggaagttgaggtaggagaattatttgaattcggcgggtagaggttgtagtgagtcgagaaagcgttatagtattttagtttgggcgatagagcgagattttattttaaaataaaattaaataaaaaatacgaattggtttttattttgaatgagttattttttttgagtttttattttttcgtttgtttaaatagcgattattaaattttgtgtttagtatttgataaacggtcgggttcggtggtttatgtttgtaattttagtattttggtaggttaatgcgggtcgattaagaggttaggagttcgatattagtttggttaatatagtgaaattcgtttttattaaaaatataaaaattagttaggcgtggtggggcgtatttgtagttttagttatttgggaggttgaggtaggataattttttgatttagagatagaggttgtggtgagttaagaacgcgttattgtattttagtttggataaaagagtaagattttgttttaaaatatatatatatgtatttggtaaatagtaaaagtaagttttttaaaatgtcgttagttgttcggataaaaagttttaaatagatcgggcgcggtggttagcgtttgtaattttagtattttgaggtcgaggcgggtggattatttgaggtcgggaatttcgagattagtttgattaatatggagaaatttcgtttttattaaaaatataaaattggcggggtgtgggggcgtatttttgtaatttcgattattcgggaggttgaagttggggaatcgtttgaagtcgggacgcggagattgcggtgagttgagatcgcgttattgtattttagtttggatttgagcgaaatttttttttaaaaaggaaaaaaaaaaaaaagtatttaattgtttataaagtgaggataattttcgataggttttttcggagttatttacgtttatatatttttgtttagcgttcgattaaggtttttaaaagtttagtggtgttttataaaaattatattattttataaaataaaatattttttattcgatacgaatttttatatacgttaaaatattttattttcgtttcggtgtacgtgtagtttatttatcgaaggatttagtcggattttagtatttcggttttttacggtttcgtttcgtttaattaggtttcgcggtttttatggtgatatattttttcgcgttcgtagttcgtggtttattttttcggcggttttttatttaggtcgaaggtttatcgtttttaaggcgtttcggcgatcgcggtttttaattatttttaagtgtttatttcgatcgattattggagttttaatttattattttcgcgtcggtcgaggaattttttttcgtattttatattatcggatttttttcgttcggtttttcgtaggtatttttttttttcgttatttcgtttttcgtttcgtttattaagtgggtcgggcgttttttttttttcgttttatttttagtgtttttattttttaggttttttttttattcggagttgcgcgcgtcgttttttttttagtttagtatttttatttggcgggacgcgttttttttttttaaaaggttcgaatttttcgcgttttttttgtagttttttttttgtatagtttttttttttcgattttgtttataagttatatttttaaatgttttagattcgatttttgtatttatttaagttaattttgcggtttcgtttttttcgagtttagggttaggtcgtgtatttttttaattttttgtgcgagttttttttcgtcgggttttaagcgtttcgtcgttatgttttcgttttcgattttatttttatttcgttatttggtgggggtagtaggcgttatcgattttcgtagtttttcgttgaggtttttcgttttgggcggtgacgcggagcgcgttaagggtttgggtttaggtttagtttcgttttaggtcgtattttcgtttggggaaggagaggtttcgggggtagcggcggtacggtcgttttcgcgtgaggttttggtcgaggttttgttggtattatttagcgtcggagatttggggaagaagttgtatagggtgttttgtcgcgatatatcgatagtcggtaaggtttaatcgttttgtcggacggagtttttaaaagtatcgtatttatcgcgcggtttttgttggcgggaaatttggggggaggcgcgtttcgtcggaggaattcgggttttagtggttaattaataggcgtttcgtcgtgcgcgggcggtgcgcgttaggtttcgttttcgggcgcgcggcgacgtggggaagggcggggttggtatattggtgggtaggggcggggttggtacgttggcggtgaggggttcgttttgtcgtcgacgtttgggtttcgcgcggggaattgttgagtttttttttttttacgtcgcggggttggtcgggtcggaatatttcgattcggggttagttgcggtcgcggggttagtaggttcggaaagttttgtttttttggagcggaagcgggaatagcgggggcgcgtatcgttcgggcggggataatcggggggattcgaaaggtttcggaaaggggttcgcggggagaaacgcgtttagcgttcgcgtgattttttgtcgttagagtattttcgtaaggagacggagcgaaagggattaaattttagttagtagtttatttttacgttgtatttttaagatttgtatagagtaggtatttggtaaacgttaaatgaatattgtaatagtattcgttagcgatgttgttgtgtatggtgaaagtttgtagttgtataaagtttttttttgttaggtattgattttagtattttatatttggtaattaaatcgatttttttaataatttgtgacgtaagtatttaagggttatagttcgttatttgagttttttgatttaggtgtgtttttataggattttttaaattttagaaagttaagagattatgagaggtcgggcgtagtggtttacgtttgtaattttagtattttgggatgtcgaggcgggcggattatttgaggttaggcgttgaagattagtttagttaatatggtgaaattttcgtttttattaaaaatttaaaaattagtcgggcgtggtggtatgcgtttgtaattttagttatttgggaggttgaggtaggagaataatttgaatttgggaggtagcgtttgtagtgagttaaggtcgcgttattgtattttagtttgggcgataagagcgaaatttcgttttaaaaaaaaaagaaagaaagttaagaggttatgagaataaaaaggttttatttaaatttaagaaagatagtggaagatagataattgtttgtttttttatttagattgtgaaatttagattgtcggaaattagttataattaatagttgtatattggtaaaaatttatgtaaaattagttgtttgttttgtttttggagattgttttgttagaaggtttttttttgttaggtaagtaataaaattaatttaaaaaaaaaaggcgggggtcgggcgtagtggtttacgtttgtagttttagtattcggtatttcggggggggggcggaggtgggcggattacgaggttaggagatcgagattattttggttaatatagtgaaatttcgtttttattaaaaatataaaaaattagtttggcgtggtagtatacgtttgtagttttagttattggggaggttgaggtaggagaatggtgtgaattcgggaggcggagtttgtagtgagtcgagatcgcgtttttgtattttagtttgggcgatagagtaagatttttttttaaaaaaaaaaaaagaatattgttaaaggtggtatgtgttaagaaaaatatagtatgttttacgaatttgtattttatttttgtgtaggggttattttaattttggtatatgtgttatttaagtaagtatagtgaaattaattgtttgagataatatttgagagttggttttttttttttatcggtatacgtaaatatttttagagagtttgggggaatatgttgaaattaaatatgtagtaaaatttatatgtttatttatattaagtagaaagaatatagaatatagattataaatagttttaggttaaaatttgttattaaatgagtttatttttaaatttttggtttatagagttttttggattttagaattgtacgtaagaggttggttattttgtatttttatattatggatgaagttgaggtatagttgggttaagtaatttgtttatgattgtatagttaggaagtggtggagtttggatttaaatttaaggaagttggttttggagttttatgttgttaatagaaatattataatatttttaatttaatattattttattttatttagttattataattattttatattaggttgaattatgtgaaattgttaaaatttgttttttttaaaatttttttgagatagggtttggttttgttatagaggttggagtatagtggcgtgattttggtttattgtagttttaattttttaggtttaagtaatttttttattttagttttttgagtatttgggattataggttcgtaatattatgtttagttaattttttttttttttaattgaggagttttattttgttatttaggttggagtatagtgacgttattttggtttattgtaatttttgttttgcgggtttaggtaatttttatgttttagttttttgagtgttaggattattggtgtttattattatgtttagttaatttttgttttttagtagagatacggttttattatgttggtttgtttgattttaaatttttgattataagtgattcgtttgttttagttttttaaagtgttgggattataggtatgagttattgtgttcggtgttttgttagtattttaaaaattttttgtagagacgaagttttattatgttgtttaagttggatttttttggttttttggttgttttgttttgagatagggttttattttgttttttagattggtgtgtagtagtgtagttttagtttattataatttttattttttaagtttaagtaattttttttttttagttttttgaatagttgggattatcggtacgcgttattattgtttagttaatttttgtatttttagtagagataggattttattatgttggttaggttggttttaaatttttgattttaaatgatttttttgtttcggttttttaaaatgttgggattataggcgggagttattgcgtttagttaagttggatcgtttttgaagtataaatattaatatttaatttattttggtttaattgaatataacgttattttttttttgttgttgttgtttgtttttttggggatggagttttgttttgttatcgaggttggagtgtaatggtacgattttggtttattataattttcgttttttaggttaaggtaatttttttgttttagttttttgagtagttggggttataggtattaatatatttagttaagttttgtatttttagtagagatggggttttattatgttggttaggttggttttaaatttttgatttcgtgattcgtttatttttgttttttaaagtgttgggattatagatgtgagttattgcgttcggtcgatgttatttttttatagggaggaaatggaggtttagaggggatgcgttagttgtaagaggttaagagtttgggttttgggttaaatggagaattgagttttgattttagttagttaagtagataattcggagtaattaatatttttttgaatttgttttttcgtttttgataaggatagtagtatttatgggttaaattttggaggttatagttagatgttttttataaattttattaaaagataagagaatatatgtattatgtggggatatttagatttttagaattggtatgaatgttatttggaattgaagatatttgagagttaatagatgtagaaagatgtcgttttaaagttttttttatgcgattaatagtagaaatttttgggagtgaagttgtcgtaaattttttttttaggggagttttagtggttagaaaaaaagataaagattatttgtatttgtaaaaataaatatttttattttttttttgtttttttagaaatttatttgttttttttatggaaggtttttttttttttttttttttttattaaatggtatatataaagtagatttcgagatttaagaaaaaaaaagttgtataaatgttaaataatagttttttggatttattttttttttttgtgaatttttgtatgtatatttgaataaaagtttgtttttttttttttttttttttgagatagggttttattttgttgtttaggttgattttttagttttagttttttaagtagttaagattgtaggtgtgcgtttttatattttgataattttattttttgtagagattgggttttgttatgttgtttaggtcggtttttaatttttgggtttaagtttttttttttatttggttttttaaagtgttaggattataggtttgagttatcgtgttcggttttaaattgtttttagtttgtagtgtttaattaatatatatattttatgattatatatgggttattttgaaaattgaataaaaatattttttttttatatgtattttttttttaaatggttatatttagtaaattgtataataattaatggagttgttttggtttaggagatgtggtaggaaagtattaaggtagtaaatatattaggtgtttgggaatttttggtttattggttaagagttttgtatttaaagtttgtgtttatattttagttgagttgtttattaaattgtacgagtttgttgggtaagttatttagtttgtgttttagtttttatatttgtaaaatagggatgatattaatattattttttttatgggttgtgttaagtattgagtgaaagggtattatgaagtttttagtttagtgtttggtacgttatacgtatttaataaattggatagttatataaataaattattaattggttagggatagtggtttatatttataattttaatattttgggaggttaagatagaaggatgatttgaggttaggagtttaagattagttagtaatatagtg

SEQ ID NO: 39 - DNA, 7168 bp, Artificial Sequence
  chemically treated genomic DNA (Homo sapiens)
tagttattttagtagttgggattataggtatatgttattatatttggttaatttttgtatttttagtagagatggggtttcgttatattggttaggttggtttcgaatttttggttttaagtgattcgtttatttcggttttttaaaattttgggattataggtatgagttatcgtgtttagtttaagattttttttattttttaatttttttttgtttgtttagttttaggtaggtggaggggagaggaagggaggaaagaaagaggggggtttagatttaaaaggaggtggggtttttttttttgtagtttataaagagggagggtaggtagattttaaatcgaattatttagaatcgtttttaagtttttattgttgttgttattgtaaagtaaaattttagtttttttattttagggttgtattaggaggaagaaaacgatttgttttatatgtaaaatgtatcggtttttatattaaagattaggtttattcgttttgttggttggcgcgtaggaggggttttatattaatttgggagaggaatgaatgtttttttagtggggtagggtttggagtttttagagatatgaatttcgtgatttgtggttggttaatgattttgagagataaggaggataaggaaggtgttgttttttataaaacgtttttgatttgtttgatgtttagtttttttatacgggtttagtagtgtttagtgtgagaagaatacgttggtaggaaggtgttaattttttatataggatataggggtagtaggtataatttatttatatgtttatttataatttttttttatgtttagaatgttttgtcgtttttttgagaagtaagaaagatttttatatttttttattgtagaggatttttggagttttagtagtagttttagtagttaatgttttgtgagtgttgattgtatgttaggtattgttttaagagttttaaatgtatatatttatttaattttttttaatatttatgtagatagaaatgaatattatttttattttgtagaagtttggcgttttaggttgtgaggggtagtcggaattgtatttcgggggggtttttatagtaattgttatttttgtattgtttttgtgttttttattagtgagtggaattttgtcgaatgttttttgtagtttatgatatttaaaaatgtttttttaagtataaaattttaatattgaatgtgtttttttaaataatgagttttttttagagattttgatataaatttttttattagaaattttgagttaagattttaagtttttttataataaaagagagtaaatatatatagaatttttttttggttttttgtagttacgtttttttttaagggttttagaaaaatatcgttaaaaaagttaaagttgaaagtggtggtgtatgtttgtaattttagttatttaggaggttgaggcgggaggattattttaggttaggagtttaaaattagtttgggaaatatagtgaaattttgttttttaaaaataaaagaggaaatttaaatattattgagaattaaaaggtaggaagttttgattttagaaagatggttttataaatgaaaggaaaagaggtattaaaatttatattttgatattattttggtagatatgaagtgttttgtgaattgaattttcgagaagtagattaaagggaggttgagggaagaagagaaatatagattattattattaatattataaatgtaaattgttttttatgatgttaaatgtatagttgttgtttttggtatatggtatgaattattgtatgatagtttgtttatagaaatatttaggtgagtaaaattataagaacgttatttatagttattggttatatgtgttgagattagttagttatattatttataagcgtttgagattagaattattcgtttattaatttatgttttgattaagtgtttggtaggtttagattttgatttgtgtttaagcgtgggagtagtttttaagatggttttgttgggtttcgttttttgttatttttatttttgttagttttttgggagtggtttgtgtgtttaatagttagtgatagatatgttagtacgtggtttttgggatgaggtgataattaattgggatttttattttggatgtttgtgtttattttttttgatttttggttttagggttgttttgttgtgagtagttttatttagaggtttatatggcggggaattaggtttatcgttaatatttatgggaacgattttgtaggtagattttttagtcgttggcgtagtggagttttgagataattatagtttttgtagatttgtttgttgtaagttaagattttgagttagaattagttatttaagttgtttttgtgtttttggtttttagaattggtgtgagttaataaatgttttaagttgttaagttttggggtaatttttgatgtaatcgtagataacgtatatattaggaatatattaggaaataaagatatttaatttattgagaagataggggattaaaataagtgtttaggtgtaaaaagtagagaatagttttttaataattatttttaaagaaatttagttataatttatatattataaaaattatttttttaaagtttatttattagtattagttttttatttgtattttttcggttgtttttttttttttttttttatttgggtattcggggtttaatttttggttttgatttttttttcgtttatggttatttttttggtgattgtatttagttcgatggatttaaatatttttaatgtgttggtgatttttaagtttatatttttagttagggttttttttttggttttgtatatttatttatttatttgttttagttattcgtgtttgacgagtattttatatttttagaggttttttatttttttttatgtttgttttttttatattttttttttttatatgagggtaattttatttttttagttgtttaggttttaaatttttattagttttgatttttttttcgtatattatttagttaatttattggtaaatttattttattattaaaaatttagtaggtttttgtatttaatttgtttttagttttgtttttgggtttttagggaataaatagtttttttttttttttataggattttttttaggtagttttagagattgtgattgtgtatttttattacgttttttttgtttattttttaaggttttagttgtttattgttttggttattttgtttttattcgttttattgtgtgttttttttttttaatgcgtgagtttgtatttgaatatagtattggaggggtggttttatgtaggtaggtagaatggagtaagttttattgtttttgtaaaaatttttttgtttatttaaatttaagttttattatggaaaatgttaagtatataaaagtaaagagaatagaatagtgaatttttttaattatttttttttaggtttaatagttattaatttatggttaattttggtatttatattgtttttggtttaattttgtgattattattaattttttaatagattttattttttagtatagttttagttttatattaaaattgagtggaaggtatagagagtttttatatgttttttgtttatgtgtttatagttttttattaatattttttattagagtggtataatttttataattgatgaatttatattgatatattattgttatttaaagtttatagtttatattaggggtttatttttggtagtgtatattttatggatttggataaatttataatgatatgtatttattattatattatatagaatagttttattgttttaaaaattttttgagttttatttatttattttttttttttttaatttttttattttttatgtaattttttattgtttttttagatttgttttttttagaatgttatagtgggaaatatataagatgttttttttttaggttggttttttttatttagtaatatgtatgtaagttttttttatgtttttttatgatttatttttttttattgttgtataatattttattgtatggatgttttatagtttatgtaattatttattttttgaaggatatttgggttgtttttaagttttgggaattatggtattatttttttaatatcgtttaatatagagttagatttagttttttatttttgggggttatggtgagatatgaaatttaggtttaaaatatatataaatatttatgtatataaatatatattttaattatttttaagtagagatttatagagtttttaacggatataatttttttggagtttcgtattagtttagcgttttaaatacggttgttttttttgtagaatgagtttagattaggcgaggatatttattattattttttagattagttcgtagtttgggggtagtggtttaagtataggttttggagtcgaaatgattgcgtttgaagtattttttttttattttttcgttgtgtgattttgggtacgttatttagtttttttgagttttattttttttttttataatatagggtttatattaaagtttaagggttattgttagtatttaggttattaattgaaggaattaaaatttgaatttgggttttttcgattttaaaattcgtgttatatttattataaatgcgattaatatataaggtattaggtcggatttaggtatatacgtggcgagatcgtagggagtagcgttcgttttgcgtttttttttttttttatattttaggttttatttgtttcgggtttcgaaggttttaggatgttgtggttgtacgcggacgttagtcgttttaaggtgatcgttagggaagatgttgttatggtcgtagtttcggtcggaaacggaaacgacgcgaatcgcgtgcgtaacgtacgggttcggcggggaatatcggttcgttgtaatatcggttcggcgtagaagcgggacgtcggtttttaggggtttaggtcggcggcggcgatggtttcggtagttgtggagagtttcgtgattaagtaattggatttgttggagtttgagagagacgcggaggtggaggagcgtaggtacgggaggtcgtcggcgtcgttttttcgcggtcggtttcgtcgtgtttcgggtagagttttcgaggggttcggttttatagtttggggcgggaatttcgttttcgatttttcgagttaggggtagggatcgttcgttttttgtttggttatttttcgagttgttagttttattattttttgggtagcgcgtttcgtttggggatttttaagaagtattttgatttttcgattcgagattttttattaagtttatatttttgggttttggtttcgattttagttttattcgtagcgagttagtagtttttttttttatttatttagtaaatatggtttgcgtttatttttagttaggtttcggtagtatgagttaggtgtattggttgttttcgattcggttagcggcgggttgggtataagtagagagtttttttttttttagtgcgtttagggtcggttgcgtgcgtgtcgcggggaaagagtttggaggaggaaggtttttttttggggagggttatggtggttttaaggagggagtggtgtttgaaggaaaattggagttaagttggtgggtgcggagtagggtggggagtcgttttgagaggtgtggggagttatgtgagagtcgggtttgttttcgaatgggattatttatttgtttaaaataattagagttaatatttacgtattttttatgcgttaatttttttatattttattttatgttaattttatagtgtaagtttttttttttttttttttttttttttttttttaaatagagtttttttttgtcgtttaggttgggagtgtagtggtacgatttcggtttattggtagtttttatttttcgggtttaagcgatttttttgttttagttttttgagtggttgggattataggcgcgttattacgttttgttaattttttgtatttttagtagagatagggttttattatgttggttaggatggtttcgattttttgatttcgtggtttgttcgttttggttttttaaagtgttgggattataggcgtgagttatcgtgttcggtcgtagtgtaggtttttgttattgttatttttcgtttaaggagatggagatagagaggggttaagtaatttgtttcggggtgatatagtgtagttcgatttgttgttaggtagtttgtttttagagtttgtagttagttatatgtgggtaggatttgtttgagatgtttttgattatggtaatggagagtttttgtagttatgttgagttttttagaattttagttgttttatttatggttgtgtgattttgtaggttttgtttttgagttttatttattttatttgtaaaattgggatgatttttattttataggtttgttttgagaatgaaacgattttttgttagttaggtgtttagcgtggtgttaaggatagagttagtttttatggtagtggttttttttgaggatgttgagtagattggtagggcgagtttgggaagggtttggttaaggagttagttttttgttttgtgtatgaaggatgggttattagcggggttaagtaggtgagggaggcgaatagttttgtattttaggaggattttttgggttttttgtttttgattggacgtggagaggttagaggtaaggtagttgagaggttttgtttagtttaggtgagtagtgatgtggatttgaatcggggttgtggtagttaggatgagaggtagagaagtttaggtagaaatgggaggggtttgataggatttagtgatagatgggaggagagaggggaatgttgattgaaagatttgttttaggtaattgagagaagggttgtggtattaattgttttagggggatgtaggaggagcgggattgggagtggagttaattcggagttttattgggatatatttagtgtttgtgagtagatttttatttatgttttttttttttttattttttttgggtgggtggaagtagaaattagtaaaaattttgaagtattaatatcgggtgttttttagg

SEQ ID NO: 40 - DNA, 7168 bp, Artificial Sequence
  chemically treated genomic DNA (Homo sapiens)
tttggaagatattcggtattgatgttttaggatttttattagtttttatttttatttatttaggaaaagtaaaagagaaagaaatatagataaagatttatttataggtattaaatatgttttaatggaatttcgaattggttttatttttaatttcgttttttttatatttttttagggtagttaatgttataattttttttttagttatttgagatagattttttaattagtatttttttttttttttttatttgttattaagttttattaggttttttttatttttatttggatttttttgttttttattttggttgttatagtttcggtttaaatttatattattgtttatttggattaaatagagttttttaattattttatttttggtttttttacgtttaattaaaagtaggagatttaagaaatttttttaaaatgtaaagttattcgttttttttatttgtttaatttcgttgatggtttattttttatatatagaatagaagattagttttttagttaggttttttttaggttcgttttgttagtttgtttagtatttttagaaagagttattgttatgggggttgattttgtttttggtattacgttgagtatttgattgataggggatcgttttatttttagagtaagtttgtgaggtgggaattattttagttttatagatgaagtaagtaaggtttagagatagaatttgtaaagttatatagttataaatgaaatagttgggattttaagaaatttaatataattgtaaaagttttttattgttatgattaaaagtattttagataaattttatttatatatggttgattgtaaattttggaagtagattgtttgatagtaaatcgggttatattgtgttatttcggggtaagttatttaatttttttttgtttttatttttttagacggaaaatgatagtaatagaaatttatattgcggtcgggtacggtggtttacgtttgtaattttaatattttgggaggttaaggcgggtagattacgaggttaggagatcgagattattttggttaatatggtgaaattttgtttttattaaaaatataaaaaattagtaggacgtggtggcgcgtttgtagttttagttatttaggaggttgaggtaggagaatcgtttgaattcgggagatggaagttgttagtaagtcgagatcgtgttattgtatttttagtttgggcgatagagagagattttgtttaaaaaaaaaaaaaagaaaaagaaaaaaaagaaatttatattgtagggttggtatgggatgaggtgtaaaagaattaacgtatggaaagtacgtaagtgttagttttgattgttttggataagtaaatagttttattcggaaataagttcggtttttatatggttttttatattttttaggacggttttttattttatttcgtatttattagtttaattttaatttttttttaggtattattttttttttgaagttattatgattttttttagggaagggttttttttttttaggtttttttttcgcgatacgtacgtagtcggttttggacgtattggaggggaagggattttttgtttatgtttagttcgtcgttggtcggatcgggggtagttagtgtatttgatttatgttgtcggggtttgattgagaatgggcgtaaattatgtttattgaatgaataagggaaagggttgttaattcgttgcgggtggaattggggtcggggttagggtttaggagtgtaagtttagtggggggtttcgggtcgggaaattaaagtgttttttaagggtttttaaacggaacgcgttgtttaggaagtgatgagattgataattcgggaggtggttaagtaggggacggacgatttttgtttttgattcgaagggtcggagacgaaattttcgttttagattatgaggtcgagtttttcggagattttgttcgggatacggcgggatcgatcgcgagggagcggcgtcggcggtttttcgtatttgcgtttttttattttcgcgttttttttaagttttagtaggtttagttgtttggttacgaagttttttatagttgtcgaggttatcgtcgtcgtcggtttgggtttttagaagtcgacgtttcgtttttgcgtcgggtcggtgttatagcggatcggtgtttttcgtcgggttcgtgcgttacgtacgcggttcgcgtcgttttcgttttcggtcgaggttgcggttatggtagtattttttttgacggttattttagggcggttggcgttcgcgtgtagttatagtattttgagattttcggggttcggagtaggtgagatttgggatatgggaggaagggaggacgtagagcgagcgttgttttttgcggtttcgttacgtatgtgtttgggttcgatttggtgttttgtgtgttgatcgtatttgtggtgaatatagtacgggttttggagtcgggggaatttaggtttagattttgatttttttagttagtagtttgaatattgataatagtttttgaattttggtataggttttatgttatgggggagaagagtgaggtttagaggagttaggtaacgtgtttagggttatatagcggggaagtggaagaagagtattttaggcgtagttatttcggttttaaagtttgtgtttgaattattgtttttaggttgcgagttggtttgaaaaatggtgatggatattttcgtttaatttgaatttattttgtaaaagaaatagtcgtatttaaggcgttgggttgatacgaggttttaaaaaggttatgttcgttaaaaattttataaatttttgtttgaaaatggttggagtgtgtatttgtgtgtatgagtgtttatgtatgttttaaatttgggttttatgttttattatgatttttaaaaatggaaaattggatttaattttatattggacgatattaaaagaatagtattataatttttaaaatttggaagtaatttagatgttttttaggagatgaatggttatataaattgtaggatatttatatagtagaatattatgtagtaataaaaagaaatgagttatgaagagatatggaggaaatttatatatatgttattaagtaaaagaagttaatttgaaaaggggatattttgtatgttttttattatgatattttggaaaaggtaaatttaaggagatagtaaaaagttatatggggggtaagaggattgggggagaaaaggataaataggtggagtttagaggatttttagggtagtgaaattattttgtatgatataatggtagatatatgttattataagtttgtttaaatttatagaatgtatattattaagggtgaatttttaatgtagattatggattttggataataatgatgtgttaatgtaggtttattaattgtaaagattgtattattttggtgagggatgttgataggaagttgtgggtatatggataggggatatatgggaattttttgtattttttatttaattttggtgtgaaattaaaattgtgttaaaaaataaagtttattaagaaattaataataattatagagttgggttagaggtaatgtagatgttaaaattggttatgagttggtaattgttgaatttggaaagggataattgagagagtttattattttgttttttttatttttgtatgtttgatattttttataataaaatttaggtttaagtaggtaggaaagtttttataaaagtagtgggatttattttattttatttatttatatgaaattatttttttaatgttatgtttaagtatagatttacgtattaggagagaaagatatatagtgaagcgagtagagataaggtgattaaaatagtgagtagttggggttttgaagagtgagtaaaggagacgtgatggaagtatatagttatagtttttaggattatttaaaggaaattttgtgggagaggaaggagattgtttgttttttggggatttaaaaataaagttagaagtaaattaggtatagaagtttgttaagtttttaatagtgggatggatttgttaatgggttgattgagtagtgtgcgagagaagagttaaaattgatggaggtttggggtttgagtaattgggaggatgaagttgtttttatgtgagagggaggagtgtgggagaagtaggtatgggaagaaatgaggagtttttggaggtgtgaggtgttcgttagatacgagtggttaaggtagatagataggtgggtatgtaaaattaggagagaagttttggttggaggtgtaaatttgggagttattagtatattgggggtgtttaaatttatcggattggatgtagttattagaggaatggttatgggcggagaggaggttaaggttaagggttgagtttcggatgtttaaatgggagaggagaggagaaagtagtcgaggagatgtaaatggggagttggtgttaatgggtgaattttaaaaaggtggtttttatggtgtgtaaattatagttgagtttttttaaaagtggttattgagaaattgttttttgttttttatatttaagtatttattttgattttttgtttttttagtagattgaatgtttttgttttttggtgtatttttggtgtatgcgttatttacggttatattagaaattattttaaaatttagtagtttaaaatatttattaatttatattagttttgagagttaggaatatagaagtagtttaagtggttggttttggtttagggttttagtttgtagtaagtaagtttgtaggggttgtagttattttaagattttattgcgttagcggttggagaatttatttgtaaggtcgtttttatgggtgttggcgataggtttagtttttcgttatgtggatttttaggtagggttgtttatagtagggtagttttaaggttagagattagaaagggtgagtataggtatttaagatggaagttttagttggttattattttattttagaagttacgtgttagtatgtttgttattagttgttggatatataggttatttttagggggttaataggggtaagaatagtaggaggcggggtttagtagggttattttggaggttgtttttacgtttgggtatagattagagtttgaatttattaggtatttagttaaggtatgagttagtggacgggtggttttggttttaggcgtttgtagatgatgtggttaattgattttaatatatataattagtagttgtaagtgacgtttttgtagttttgtttatttaggtgtttttgtgggtaggttgttatgtagtggtttatattatgtattaggagtagtagttgtgtatttagtattataaagggtagtttgtatttgtagtattaatggtaatgatttgtgttttttttttttttttagtttttttttggtttgtttttcgaaggtttaatttatagagtattttatatttattagggtaatattaaaatgtgggttttggtgttttttttttttttatttgtagaattatttttttaaagttaaaattttttattttttggtttttaataatatttaaatttttttttttgtttttaagagatagagttttattatgttttttagattggttttgaatttttggtttaaagtggttttttcgttttagttttttgagtagttgggattataggtatgtattattatttttagttttaatttttttgacggtatttttttgagatttttaaaagaagacgtaattgtaagagattaaagagaaattttgtatgtgtttgtttttttttattatggaggagtttgaagttttaatttaagatttttgatgaggaagtttgtattagagtttttaagagaaatttattatttgaaaaagtatatttagtgttaaaattttatatttgagaaaatatttttaggtattataaattgtagaaaatattcgataaagttttatttattggtgggagatataggagtagtgtagggatagtagttattgtagggattttttcggggtgtagtttcggttgttttttatagtttgggacgttaggtttttgtaagatggaagtaatgtttatttttatttgtatgggtgttggagaggattaagtaaatgtatatatttaaagtttttagaatagtgtttggtatatagttagtatttataaaatattggttgttggaattgttgttgggattttagggattttttgtagtggggagatgtgggagttttttttgttttttaaagaagcggtaaaatattttgagtataggaagaagttgtaagtgagtatgtgggtaggttgtgtttattatttttgtgttttgtgtgagaggttagtatttttttgttagcgtgttttttttatattgggtattgttgaattcgtatggggagattagatattaaataggttaaagacgttttgtagagagtagtattttttttgttttttttgttttttaaggttattgattaattatagattacggagtttatgtttttaggagttttaagttttattttattgggaaagtatttattttttttttagattggtgtggagttttttttgcgcgttagttaataggacgggtgggtttggtttttggtgtggaggtcggtgtattttgtatatggagtaagtcgtttttttttttttaatgtaattttggagtagaaagattgaaattttattttgtagtggtagtagtaataaaagtttaaaaacggttttgaataattcggtttgggatttatttattttttttttttgtagattatagaaagaaagattttatttttttttgaatttaggtttttttttttttttttttttttttttttttttttatttatttgaggttgagtaggtaggggagagttaggaaatgaagaagattttgggttgggtacggtggtttatgtttgtaattttagaattttgggaggtcgaggtgggcggattatttgaggttaggagttcgagattagtttggttaatgtggcgaaattttatttttattaaaaatataaaaattagttagatgtggtggtatgtgtttgtaattttagttattaaggtgattg

SEQ ID NO: 41 - DNA, 6067 bp, Artificial Sequence
  chemically treated genomic DNA (Homo sapiens)
agagattattttattatttatttagttttaggagtgtatttagggttttgttttcgttttttttatagttttgttttttttgttttttggttgtttttgatatttgtagagtatttgggatagtatttgtatatagtaaatttagtgtgtttgttagtttatatattatatatatataaatatattaataaaattttttaaggttttgtttattggttattttttttaggaagttttttagaattatttagtaagtttttaggtggagttgattattttttttgtattttttttttattttttttttaattttatttttattattatgggttattatttataatttttttttgttttttggtttttgtttattttattaagttttgaattgtttaagagtcgagattagttttggattttaaacgtttagtgaagggtatgtatatagtaggtgtttaataagtatttgttatattggaattgggttttgttaataggttttagattaggtttgagtttttttgagttttttgtaagttttaacgttttaggtttttgggtgatgtgtgtgtttgatgttgttttatttttagattttcgagtttttgtttttagaataagtagtgagaaagaagttgtaagaatgtattttataatatatgtttaaataattatcggtgaaagagttgttaagagtgtgtttattttgtgttggatgtttttttgaataatttatttatgagatagatattattatgttttttattttttatatgaggaaattgaggttatagaaaggtgaagttatttatttaatagtatttattaagtattagtagcgtaatggtttagagtttatgttttcgaattttgtaatagttattatttaattagttattttatgttttaggtattagggttatgtgttttttttatgtatgattttatagtatttttataatggttttatgaggcgggtatcgtgataattttattttaaaggatgagaaaattgaggtttggagatgtgaagtttattgtttaaagttatttatttaggaagtcgtggagtatgttttaggtagtttaaaggtagagtttgtgtttttaagtattttgtttttgtttatagttttttaattaagggttttaaatttatatatttattgggattaggtaggtaaaataagtaaaagatagtgttagggatgaggtagtagagagtggtagggtttggggtaaatttgggtagtaaagttttatttaagaggggtggtcgtttgttaatggaaatatgggtttatttttttcggtgttttagtggaagttggaaatttaattgtgtggggaataatttttgtttaaaattggggttagattaggtatcgtggtttatatttgtaattttagtattttgggaggttaaggtaggtagattatttgaggtcgggagtttaagattagtttggttaatatggtgaaattttaaaaatataaaaattagttgggtatggtggcgtatgtttgtaattttagttattggggaggttaaggtaggagaattgtttgagtttaggaggttgaggttgtagtgagtggagattgtgttattgtattttagtgtggatggtagagtaagatttcgttttaaataaaataaaataaaataaagtaaaataaaattggggttaatttggttgggtgtggtggtttatgtttgtaattttagtattttgggaggtcgaggtgggtagattattttagtttttttgaggttaggagttcgagattagtttggttaatatggtgatattttatttttattataaatataaaaattaggtgggtatagtggtatatatttgtagttttagttatttgggaggttgaggtgggggaattttttgaatttaggagttggaggttgtagggagttaagatcgtattattgttttttagtttgggtaatagagtaagattttgttttaaaaaaataaagattaaataaaatataattggggtttattaaaatatttttggttatttgggtgtgattttggtttttttggattttttatttgtttttttttgtatagttgtagggaattatttgtgagtttgtttttttaacgttaatttttttgtttagttagaaagtattagaagggtagggatttttgttttttgtttaattttatcgttttaattagaatatttttagtttatagtatgggatttggttttttatttattgaatagatggatttttttttttattttgcggtttttttgtagtttagttttttagtttttgttttttagtttttgttacgtgtataaaatttggtttttttgtttttttggttgtttttggtgtttttgtttttatgtttttatgtttttggaatttttcgtgattattttttttttttggggtgtgtgtgttttacgttttgtttttcgaagtttttattatattttgtaagttaggtcgggtatagtggttcgcggttgtaattttagtattttgggaggtaagacgggtagattatttgaggttatgagtttgagattagtttggttaatatggtgaaattttatttttataaaaatttaaaaattggttaggcgtggtggcgcgtgtttgtaattttagttatttaggaggttgaggtaggagaaataacgtttgaattcgggaggtggaggttgtagtgagtcgagattgtgttattgtattttagtttgagtgatagagtaagattttgttttaaaaaaataatataaagtaaaataaaataaaaataaaaataaaaaattatataaaaattagtcgggtatgatggtaggtgtttgtagttttagttattcgggaggttgaggcgggagaattatttgaatttaggaggtggaggttgtagatggtattattgtatttaagtttgggcgatagagcgagattttatttcgaaaaaaaaaaaaaagtttgtaagtcgggtttatattattttttgtttcgtgagtatttttgtttttttagttttttttttttttttagtatatgtttttttttgattttcgtttttttgtaaggtgtatttggttgttttagttggtttttttttttttgtatttttgggtggggtgttttttgttcgttttttatttatatttattttcggtgttttttttttttttagtaggatagcggtttaggtttacgtattttacggcgggtcggttgggcgtacgtacgtttttgtatataagtcgtacgtagttgtatttgagtacgtcgatgagcgtgtagagcgggggcgtattggtttagcggtagcgcgttaggtgtatggagtttttgacgaagaagagcgttagtcgttgttggtattacgcgtcgaagaagcggttgaattcggtttacgagaagaaggttcgttttcgtagtttttgttttttttgtttcgtagtcgtgtcgggtgggggtttcggtcgttttattttgggggtttgcgtggaggaggggagaataggtggatattagatttatttttattcggggtattttatttattttatttttggtttgtttcgtcggttgttggtgtttttatcgaggtgggtagttcggggtcggacgtgtttgtttttttttaaatatataaatattaatttttattttatttttggtttttttttatcgttttatttttggtttatttggagtttgttattttgatttttaattttaattcgttttttttttcgtagatgtgatttttaggtatagttggaatttttttttttaaaatacgatttttaagtttagatgttttttaaggatatttttttaaatgtgtttttaaattttagttaaaattttttttttttttagttgtgttttttatttaagagtaatttttaattttcgtatttatttggaatttttttttttatgtgttaatagttggttgtaatttttttaaagacgttttatttttagatgtgtttttatatttaggttacggattttttattcggttatatgttttatgtatttgtggtttcgtattttttagatgtgtttttggcgtgtagttgttgttttttttttcgattatgattttatggttcgttatatgtagttgtagttggggtttttttgagatatttttatttttagatgtattttttatatgtagttatttacgtttcgtttataggtgtgtgttttatttgtggttagtttttttcggaagtgttattagtatttatttgtggtttttttttttttagatgcggtttttagtttagttgtgggtttttttttttagttatatttattatttttcgtaatatgtattttcgttttagatatggtttttcgttttcggatgggtttttttattttagatgttttttttacgtttagttgcgcgttttttttcgagtagttttatttagttcgttttcgacgtttttatttttttttttttcgttcgttgcggtattttttagtttcgtcgttttatttagttgtgttttttttttttttaagatgtgtatttttttcgtttttttttatttatttattcgtttcggagcggcgtttattttttataatgtttcgcgtttaggtttggttcggtttttgttttcgggatgtttcgcgcggtttttcgttttttttttcgtcgtgtttcgcgggggcgtttttatcgattttttttttttttttgttagttattttttagatttttagttatattcgtttatttagggcgagggaaagcgcgggtatttttttagtgtgttttgcgggagggttcgttttattttattttttttttcgttttttttttattcgggagattacgatttttagtgtttttcgcgcgacggcggcggtgcggacggtgtttaggtttcgtttttaggttttgtttcgttttcgttcgtagacgtttgcgcgcgaatgtcgtggcgcgaatttgggattgtagaggcgcgtttggcggatttgagtgtgttgttcgggtagcggcgcgcgggattaacgtaaggtaagtggggtcgttcgtaagtagatgggaggcggagggcggcgggtgcgtcgaatgtttggggtttatgtttcgttatgtcggggtgtttgtagaggagtgggcgtggggacgttgaggttgtcgagagcgcggtggagacggaagagcgcgggttgcgggtcgtcggagagtgtagagaggtgttttttagagggaggggggttaggtagagggtagacgagagatagagatagttggataggttttttgagaagaggttttgaggtgcgagtttatttggaagggggagaggttaaatggaattgaggggcggggcggggggggggaaaattgtgtgggcggggttagttggaaatcggaaggtttttcgagggggcggggttatttgggagggggaggggttgaagggagttaaggggcggggtcggggaaaagattgcgtgtgggcggggttatttggaagggggaggtgttaagggtggggttggttgggaatcggaagtgttgagggggcggcggttatttggaagtgttgagggggcggggttagaagaaggtaaatcgcgggtagtagtattatttggaaggagtgggttttattggagggagatgggtggtgttagggagaggttagtggtagggtttaggtttaggtaaagggttcgtaaaagatggagaattatttgaatggggagacgtttggtttaatgtatgtttgataaagggatggagttttttttttgtttttattttttattttgaaataattatagatttaaggaagttgtgaaaagagtatatttatttttttttaatggtgatattttatgtagttttaatatcgaaattaggaaattgatattaatatagttttgttaattagattatagattttgtttagtttttattagtttgtgtggtgtgagtgtgattgtgtatttgtgtgttcgtgtagtttgattttttgtatagatttgtgtaatttttatcgtaattgtgat

SEQ ID NO: 42 - DNA, 6067 bp, Artificial Sequence
  chemically treated genomic DNA (Homo sapiens)
attataattacgatgggggttatataaatttatataaggaattaagttgtacgggtatatagatgtataattatatttatattatataaattggtgaaaattgaataaggtttgtaatttagttaatagaattgtattgatgttaattttttggtttcgatattgggattatataagatgttattattaggggaagatggatatattttttttataatttttttgaatttataattattttaaaataaaaagtaaaaataagaggggagttttatttttttattaagtatatattaagttagacgtttttttatttagatgattttttattttttacgagttttttatttagatttggattttattattgatttttttttgatattatttatttttttttagtagggtttattttttttaggtgatgttgttgttcgcgatttatttttttttagtttcgtttttttagtatttttaggtggtcgtcgtttttttagtattttcggtttttagttagttttatttttggtattttttttttttaggtggtttcgtttatacgtaatttttttttcggtttcgttttttagttttttttagttttttttttttttagatagtttcgttttttcggggggtttttcgatttttagttggtttcgtttatatagtttttttttttttcgtttcgttttttagttttatttggttttttttttttttaggtgaattcgtattttaaggtttttttttagaggatttgtttaattgtttttgtttttcgtttattttttatttggtttttttttttttgggagatatttttttgtatttttcggcggttcgtagttcgcgttttttcgtttttatcgcgttttcggtagttttagcgtttttacgtttatttttttgtagatatttcgatatggcgaagtataggttttaagtattcggcgtattcgtcgtttttcgttttttatttgtttgcggacggttttatttgttttgcgttggtttcgcgcgtcgttgttcgggtaatatatttagattcgttaggcgcgtttttgtagttttaagttcgcgttacggtattcgcgcgtagacgtttgcgggcgggggcggggtagagtttaggggcgggatttgggtatcgttcgtatcgtcgtcgtcgcgcggaggatattgggagtcgtagtttttcgaatgggaggagggcgggaaaaggggtgaagtggggcgagttttttcgtagagtatattgggaaaatgttcgcgttttttttcgttttggatgagcgggtgtggttgagggtttgaggagtgattggtagggaaagaggaggaatcggtggaagcgttttcgcgaggtacggcgggaagagaggcgggagatcgcgcggggtatttcgggagtaagggtcgggttaggtttgggcgcggggtattgtgggaggtggacgtcgtttcggggcgggtaggtgagtggggaggggcgggaagggtgtatattttggggaggggagaggtatagttaggtgggacggcggggttggaaggtgtcgtagcgggcggggagggggggagtaggagcgtcgggagcgggttggatggggttgttcgaggggagacgcgtagttggacgtggggggagtatttggggtgaaggagtttattcgaggacgaggggttatgtttagaacgaagatgtatattgcgggggatggtggatgtaattgggaggaggggtttatagttggattgggggtcgtatttgaggaggaggggattataggtgaatattggtgatattttcgaggagaattagttataagtggggtatatatttgtaggcgaagcgtggataattgtatgtggggagtatatttggagatgagagtgttttagggaagttttagttatagttgtatgtggcgagttatagggttataatcgggggaaggggtaatagttgtacgttagaggtatatttggggagtgcggagttataggtgtatgaagtatgtgatcgggtgaggggttcgtggtttggatgtgggagtatatttggagatggagcgtttttggaggggttatagttaattgttggtatatggaaggaggagttttagatgaatacgagagttagaagttatttttgggtgagagatatagttggaaggggaggaggttttagttggaatttgagaatatatttgaggagatgtttttaaggaatatttgagtttaagggtcgtattttgggaggagagattttaattgtatttaagggttatatttgcggaggaggagacgagttggaattaggaattaagatgataggttttaagtgaattagggataaggcggtgggaggaggttaaagataggatggaggttgatatttatatatttggagaaaaataggtacgttcgatttcgggttatttatttcgatagaggtattagtaatcgacggggtaggttaagaatggagtagatgagatatttcgggtgggaatgggtttgatatttatttgttttttttttttttacgtaggtttttaggatggagcggtcggagtttttattcggtacggttgcggggtaggaggagtaggagttgcgggagcgggtttttttttcgtgggtcgagtttagtcgttttttcgacgcgtggtgttagtagcggttggcgttttttttcgttaagagttttatgtatttggcgcgttgtcgttgggttagtgcgttttcgttttatacgtttatcgacgtgtttaagtatagttacgtgcggtttgtgtgtaaggacgtgcgtgcgtttagtcggttcgtcgtggggtgcgtgaatttgagtcgttgttttgttggggggaaggggagtatcgggggtgggtgtgggtgggagacgggtagagaatattttatttagagatgtagagggggagaggttaattgaggtagttaaatatattttgtagagaggcgggagttaaggagggatatgtattgagagaagaagaggagttagagagataaagatatttacggagtaagagatggtgtgggttcgatttatagatttttttttttttttcgagatggagtttcgttttgtcgtttaggtttgagtgtagtggtgttatttgtagtttttattttttaggtttaagtgattttttcgttttagtttttcgagtagttaggattataggtatttgttattatgttcggttaatttttgtgtggttttttgtttttgtttttgttttgttttgttttgtgttgtttttttgagatagagttttgttttgttatttaggttggagtgtaatggtataatttcggtttattgtaatttttatttttcgagtttaagcgttgttttttttgttttaattttttgagtagttgggattataggtacgcgttattacgtttggttaatttttggatttttgtagagatggggttttattatgttggttaggttggttttaaatttatgattttaggtgatttgttcgttttgttttttaaagtgttgggattatagtcgcgagttattgtgttcggtttgatttatagaatgtaatagagatttcgagaggtagagcgtaaaatatatatattttaagaggagaaaatagttacggaaaattttagaaatatggagatatggaggtagagatattagagatagttagggaaatagaagagttaggttttgtatacgtgataaagattgggagatagagattaggagattgaattgtagagaagtcgtaggataaagaaaaggatttatttatttagtgaataaggggttaggttttatgttgtgggttggggatattttagttggagcgatggagttgggtaagagataaaaatttttgtttttttggtattttttgattggatagaaagattgacgttaaaagaataagtttataggtagttttttataattgtgtaaagaggggtaggtgagaaatttaggagagttagaattatatttaggtggttaggggtattttaatggattttaattgtattttatttagtttttatttttttgagatagggttttattttgttgtttaggttggagagtagtagtgcgattttggttttttgtaatttttaatttttgggtttaagagatttttttattttagttttttaagtagttgggattataggtgtgtgttattatgtttatttaatttttgtatttgtagtagagatggggtgttattatgttggttaggttggtttcgaatttttgattttaaggaggttgaggtgatttgtttatttcggttttttagaatgttgggattataggtatgagttattatatttagttaaattgattttaattttattttattttattttattttattttatttgagacggagttttgttttgttatttatattggagtgtagtggtataatttttatttattgtaattttagttttttgggtttaagtaatttttttgttttagtttttttagtagttgggattataggtatgcgttattatgtttagttaatttttgtatttttagggttttattatgttggttaggttggttttgaattttcgattttaggtgatttgtttgttttggttttttaaagtgttgggattataggtgtgagttacggtgtttggtttgattttagttttaaataggggttgttttttatatagttaggtttttagtttttattggaatatcggaagaggtgagtttatgtttttattggtagacggttattttttttggatggggttttgttgtttaggtttgttttaaattttgttattttttgttgttttatttttagtattgttttttgtttgttttgtttgtttggttttagtaggtgtgtgagtttgagatttttggttggggagttgtagataagaatagagtgtttaagaatataggttttgtttttaggttgtttgagatatgttttacgattttttggatgggtgattttgggtaatggattttatatttttaagttttagtttttttattttttgaaatggggttattacgatattcgttttatggggttattgtgaggatattgtgagattatatatgagaaaaatatataattttggtgtttggaatatggggtggttggttaagtgatagttgttataggattcgagagtatggattttgggttattgcgttgttgatgtttggtggatgttgttgagtgagtgattttatttttttgtggttttagtttttttatgtggaaaatgggagatataatagtgtttattttataggtaaattatttagaaaggtatttagtatagagtaagtatatttttaatagtttttttatcggtagttatttaaatatgtattgtgaaatatatttttgtaattttttttttattatttattttagaaatagagattcggagatttgaaagtggaatagtattaaatatatatattatttagaaatttagaacgttagagtttgtaagaagtttaaagaagtttaggtttaatttgaaatttattaatagaatttagttttaatgtaataaatgtttattgagtatttattatgtgtatgttttttattggacgtttagaatttaagattgatttcggtttttgaatagtttagaatttaatggggtagataaagattaaaaaataaaaaaaaattatagatagtggtttatagtagtgagagtgagattgagggggagatgagaggaggatataaagggagtggttagttttatttgaaagtttattgggtggttttggaaggttttttggaagaggtaattagtaagtagaattttgaagaattttgttgatatgtttatgtatgtatagtatgtgagttaatagatatattaggtttattatgtgtaggtattgttttaagtgttttataaatattagagatagttaaggagtaggagagataggattatggagggggcgaggatagggttttgggtatatttttgggattgggtagatgatgagatggttttt

SEQ ID NO: 43 - DNA, 7145 bp, Artificial Sequence
  chemically treated genomic DNA (Homo sapiens)
ggttaatatggtgaaattaggtttttattaaaaatataaaaaaattaattagtcgtggtggtatgcgtttgtggttatagttattggagaggttgaggtggtagatttttttgaatttgggaggtagaggttgtagtgagtcgagtttttattattgtattttagtttggatgatagagtaagattttgttttaataaataaataaataaataaataaataaataaataaataaataaataaaatggattaatttaataatattcgagtataaaagtaaattatttttataattattaatgttgtaaagtaataatagtgataatgatattaataagttaggaattgttttaagtgtttttttatataatttatttaatttttataatttttttttttttatattattgaggaattgaagtagatagtaatgaatttgagtttttttgtttgaaacgaaggattttttttgttaatttttttttttttttttttattgtttaggtagttttaagttttgttaagttatttttatgaatatagtttgaatttgttttttttatttttattgttttattttggttagagttattattattatttgtttggatcgttataatagtttttcgatgagtttttttatttttatttttgtttttttttatttattttttacgatgtagttagggttatttttttagattaaaaatttggtttgttgttttttatttttaaattttgcgacggtttttttatatgtaggaaaaaaagaatattttttataatggttaatttagttttgttatgtttagttatttttttttttaggttaaattttgttggttttttttgagtttttataaggtatggttttttttgtattagtgattttgtttatgtagttttttttgtttggaattgttatggagtgaattgtgttttttttttaatttaagtttgtttaatttttgggttataggttgtatgtagtttaggatggttttgaatgtagtttaatataaattcgtaagtttttttaaaatattatgagattttttttcgatttttttttttagtttattagttattattagtgtattttatgtgtagtttaaggtaattttttttttattgtggtttagagaagttaaaagattggacgtttttgttttaatttatatattgaagttttagttttgaatgtggttgtatttggagatagtatatattattattattgttttttttttttttttttagagatagggttttattttgttgtttagattagagtgtagtagtgtgattatagtttatatagttttaaatttttaggtttaagtgttttttttattttagtgttttgagtagttaggataataggtgtgtgttattatatttgatattcggttaatttttaaaaatttttgtagagataaggttgttattttgttgtttaagttggtttcgaatttttggttttaaatgatttttttgttttaggttttttaaagtgttgggattataggtgtaagttattatgtttggtttggagatgggttttgaaaggatataggaagggttaataagtgagtttgtatgggtaggatattaattagatagaattggtgtttttgtgaaatgaggagattttagagtattttttttttgttttttttcgtttttcgtattgtttttttgagtatatataaagatgaggttatagtaggatatagtgagaaggtggttgtttgtatttaggaagagaggttttattagaaattaatttttatggtattttgattttggatttttttattttagagttgtgagaaaataaatttttgttgttgaagtttttttgtttgtgttattttgttatggtagttagagttaattaatataggaatagttttttattttttaggttttgttttgaatatttatttatttatttaataaatgtattgagtgtttattttttgttagacgttgtcggagttttatgtgtattaatttatttattatttacgtagggaaatttttgaaatgatgttatatgatgttatatttttttgttgtatgtttttaaaatattttggtattttttatatttagaaattatagatttagttggtatagtggtttatatttgtaattttagtattttgggaggtcgaggtgggagtattatttgagtttaggagtttgagattagattgggtaatatggtgagattatgtttttataaaaaaaatagttaggtggtatgtatttatagttttagttatttaggaggttgagatgggtgaattgtttgaatttgggaggttaaggttgtagttagtcgtgattatgttattgttttttatttgtgatagcgagattttgttttaattaaaaaaaaaattaaaataaataaacgaataaaaaaaagaaattatagaattatagatttatggaattattttatttatttatttatttaataaatagtattgagtattttttttttattttttttttttttttgagatggaattttgttttgttattaaagttggagtgtagtggtatgattttggtttattgtaatttttgtttttggggtttaagtgatttttttgttttagattttttagtagttgggattataggtattcgttattatgttcggttaatttttgtgtttttagtagagatggagtttcgttatgttggttaggttggtttggaatttttgattttaggtgattcgtttgttttggttttttaaagtgttgtttgttattttagtattttgggaggtcgaggtaggcggattatttgaggttaagagtttgagattagtttggttaatatcgtgaaatttcgtttttattaaaaatataaaaattagttaggcgtggtggcgggtgtttgtaattttagttatttaggaggttgagggaggagaattgtttgaatttaggaggtagaggttgtagtgagttaaaattttgttattgtattttagtttgggcgataagaataaaattttgtcgtaaaaaaaaaaaaaaaaaattattagtttattgtggtggtaagggtttgtaattttagttatttgggaggttgaggtaggagaattatttgaatttgggaggtagaggttgtagtgagttaagatcgtggtattgtattttagtttgggcgatatagcgagattttgttttaaaaataattaaattaattaatttaatttaatgataataaaaggtatagtatattaaatatataaattagtaatatcgttttttattattattataaagttttatatattgtatataatagtgtgtgttatgtttttatataattggtaatggagtaggttcgtttttattagtatttttataaatatatgagtaatgtgttgttattatatgatagggattttttagttttattataattttatgggattatttttatatatttggtttattgttggtttaaatgttattatgtggtatatattattaatgagatattttattttttttagtatgaattttttggtgtgtattttttttatttatagtatattttaattttatgtaatatttaagtgtttaatagttacgtgtggttagtgattatagtattggaaaaagatagatacggttgaggaaatttaaaaaaatgtagtaaatgtagttgtagagacgtgtttaagattatttaattattatagttaggacgtgagtttttagcgattttttaattgtttggttgaattaaagttttggtttattttgttgcgtattaaaagtaggttttatttttttttaaatagtagaatcgtagttaaatttagttaaataaatttaatgtatttaatataaaatttatttttttaattttaatattttttttttttttttattttttattttagttgatggtattattatgtttttgtttatttaaattattattattttatttataaacgagtattttatttagaagattatttaaattttaaatgatttttaaaaacgtattttattttttattttaattagttgaattattttttatatgggttattatgagagttttttgatttgtttttttgttttagtttttttttatttagttttagtagtattttttaagattttttatggtttttcgttttttatagagtaaagacgatattttttattatatagtatagaattttttcgggaatttgttttttgtttatttaataaggtttagttgtttgttttttttagattttgaagaggttatttatttttaggttgttatatttgtaaaaatcgttattttaatttttaaagagttggttttagatttgagataatatattttgaatgatatataattaaggagttttttttttattatttttttatattttatatttatttgttgtttagtgtttcgttttaattttatgaaagttattgaatataaattatttattagggagtttgcgggatataaatagagggattatatttaaaaaatagattgacgcgatttttgtttttttcgattttattataatatagtttttttattaatatttttaaaaatagattttttttaatagtatgagaaaattaaggggagtttcggaagtttaggttaggttgcgtttcgaggagtcgttacgtttttttattttcgtttttcgggtcgcgattgtaggttgaaaattatttttaaatattatagggtaggtagaatgtaattacgatttacgtggtagacgggggcggggatcggtcgcgtggtcgcggttttggtttttgcgtttgcgcgttgtttttcgttttaggattcggatttaaagagataggcgttttaatcgtcgtgggttgttcgcggtttgtaatgagtaagtttcgaggtttacggtgagcgtcggagtcggagaggtaggtgaggggttacgcggcgcggtacggcgcggcggggttcggcgtggggaaggtagcgggtcggggcgaggagttcggcgcgggtcgggagttagtttttcggttgtttttttcgttcgtttgcggagtttcggggtatatttttcgtgacgtggcggttttttcgggagtttaggggggaggttcgcggtttttcggtttcgtcgggggaagcggtttacgtcgtcgattttattgttttcgttatttttcgatagcggcgcgggaagtttttcgagaaaagcggcggcggttaggttttagcgatttttttttcgggtttttgggttgcggtagttgtgagggtgcggaacgagggatagacgggtttttttaaagttgtattgtgttttttcgtggtttagcgtttttcgagttttttttaagtttattttttttattattggggttttagaggttgttttgtaaattgattttttaggaaaagtgttgaaatttatttgttttgatttttttttatgggtttgtcgtatttttatttattttatttttgtggtttttaaattttgggagttatatagttttttgtgaatattacgaaagtgatagattttttttaaaaaatcgtgtatttttatcgaatgtatattttgtatatatttttagagagtttagaatagttttttttttttataattagcgtatttatggattttttgtaatttttttaattattttgtgaggtaggtattatttattttgttttagaaataagaaaatagatgtagataaattaagagtttttttcgaggtaatagttagtaaattgtatagttagatttgtatttttattttttattttaggtttattagtttttttttatattatgttgtattatagtaagtaaagtttgttttttattataacgtgatagtaattttgttttatagcgtgtgtagattgaatataattttagtatatttaaaattaggattataaaatgttttagaaaatatgaatataagaagatgttgatataatttttttttatttggattgatttatgagtttttgtgagttttgttgtttagtgattttagtattttttgatttaagttgttgaatgataaataggttaattgtatatcggaagtttttttttgaaagataacgacgttatcgattataataggagttgacgttaatgagagtttttgttgtgtgtttaattgttttaagggttttatttttagaatagttttttaagttaggttttataattagttatattttatagataaggaagtttaggaatagaggtaagaaatttattaaggttatatagttggtaagtggttgagttaggatttgaatttaggtagtttgattttaggttttgtttagttgttttttaatatagggattttaatttaattttaaatttatatagtggtttgatttttgaggatggtatatgtgttaaattttataataaaaattttatgaatataatgtaatttttattggtgattaaaacgaaattttagggttaggtacggtggtttatgtttgtaattttagtattttgggaggtcgaggcgggcgaattatttgaggtcgggagttggagattagtttgattaataagaagaaatttcgtttttattaaaaatataaaaaagttagtcgggcgtggtggcgtatgtttgtaattttagttattagggaggttgaggtaggagaatcgtttgaattcgagaggaggaggttgcggtgagttaagatcgcgttaatgtattttagtttgggtaattaaagtgaaatttcgttttaaaaaaaaaaaaaaagaaagtttaggattttgtaatatttaaaggttattatttattatgagtattatatgttgttgatggtttaaaaagagtttttatgttatttggattttttttattgtgatgtattagatgtatatgtgtgtattagataattgaatattttgttgcgagttggttttttttgtattagaatttttttatgttgtagagtagattatgaatgtaatattttggaaagtgtttgattagttattatggattatataagacgttggtttttggaaaattggaagtttatttttttgtttatattttttttttttttttttggttttttattttttcgtatagt

SEQ ID NO: 44 - DNA, 7145 bp, Artificial Sequence
  chemically treated genomic DNA (Homo sapiens)
gttgtacgaaagagtaggaggttaaaaaaaaaaaaaaaagatataaataaggagataggtttttaattttttaaaggttagcgttttatatagtttatgatgattaattaaatattttttaaagtattatatttatagtttattttatagtatgaaagagttttgatataggaaaagttagttcgtagtaggatgtttaattatttaatgtatatatgtatatttagtatattataatgaagaaaatttaaataatataaaagttttttttaggttattagtaatatatgatatttataatggatgatgatttttaagtattataagattttgaattttttttttttttttttttgaggcggagttttattttaattgtttaggttggagtatattggcgcgattttggtttatcgtaatttttttttttcgggtttaagcgatttttttgttttagtttttttagtagttgggattataggtatgcgttattacgttcggttaatttttttgtatttttaatggagacggggtttttttttgttggttaggttagtttttaattttcgattttaggtgattcgttcgtttcggttttttaaagtgttgggattatagatatgagttatcgtgtttggttttgaagtttcgttttaattattagtaaaaattatattatgtttatgaagtttttattgtgaagtttaatatatatgttatttttagaaattaagttattatatagatttggaattgagttagaatttttatattgagagataattaagtagagtttggaattagattgtttgagtttaaattttaatttagttatttattagttgtataattttgatgggttttttatttttgtttttgagtttttttatttgtaaaatgtggttaattatggggtttaatttaaagagttgttttaagagtaaaatttttaaaatagttgggtatatagtaagagtttttattaacgttagtttttattatgatcggtgacgtcgttattttttaagaagaggttttcgatgtgtaattaatttgtttattatttagtaatttgaattagagaatgttgaagttattgggtagtaagatttataggaatttataaattaatttaaatggaaaaagattatattagtatttttttatatttatgttttttaaagtattttatagttttagttttaagtatattggaattatgtttagtttgtatacgttgtgaagtaaaattgttgttacgttataataaaaagtaggttttgtttattgtagtgtaatatgatgtgaaggaaagttggtggatttggaataagggatgggagtgtaagtttgattgtatagtttattgattgttatttcggagaaaatttttaatttatttgtatttgtttttttatttttaaagtagggtaaataatatttattttatagggtagttgggaaaattataaggaatttatgaatgcgttggttgtgggggagggaggttgttttgagttttttaaaaatgtatataaaatgtatattcgataaaaatgtacggttttttggaggaggtttattattttcgtgatatttataaagggttatataatttttaaagtttaagaattatagaggtgaggtaagtggaagtacggtagatttataaaaggaggttagaataagtgagttttaatattttttttagaagattaatttatagagtaatttttagggttttaataatgaaaggagtggatttgagggaggttcgggaggcgttgggttacgaggaggtataatgtagttttgaggaaattcgtttgtttttcgtttcgtatttttataattgtcgtagtttaggggttcgagaaggaaatcgttgaggtttggtcgtcgtcgtttttttcgaagggtttttcgcgtcgttgtcggagagtggcggggatagtggggtcggcggcgtaggtcgtttttttcggcgaggtcggggagtcgcgagttttttttttgggttttcgggagggtcgttacgttacggagggtgtgtttcggggtttcgtaggcgggcgggggaggtagtcggggggttggttttcggttcgcgtcgagtttttcgtttcggttcgttgttttttttacgtcgggtttcgtcgcgtcgtgtcgcgtcgcgtagttttttatttgttttttcggtttcggcgtttatcgtaggtttcggaatttgtttattataggtcgcgggtagtttacgacggttggagcgtttgtttttttaaattcgggttttagagcgggaggtagcgcgtaggcgtaagagttaaggtcgcggttacgcgatcggttttcgttttcgtttgttacgtgggtcgtagttgtattttgtttgttttgtgatgtttgggagtagtttttaatttgtaatcgcggttcgggaagcggaggtggggggacgtggcggtttttcggaacgtagtttggtttgaattttcgaggttttttttgatttttttatattgttagagaggatttgtttttaaagatattggtggagaaattatattgtaatgaggtcggggaaggtaaagatcgcgttaatttattttttaaatataatttttttgtttgtgtttcgtagattttttagtaaatagtttgtatttagtagtttttatggaattgagacgaggtattaaatagtagatagatataaaatgtaaaggagtgatggaggagaaattttttgattgtatattatttaaagtgtattattttaaatttgaagttagttttttgagagttgggatggcgatttttataaatgtagtagtttgagggtaagtgatttttttagagtttaggaagagtaaataattgggttttgttaggtaagtaaagaataggttttcgagagaattttgtgttgtgtgatgaagagtgtcgtttttattttgtagaggacggagagttatgaagagttttagggaatattgttgaagttgggtggggagagattgaggtaagggaataaattagaaggtttttatagtgatttatgtgggagatgatttagttagttagggtggagagtaaagtgcgtttttgaagattatttagaatttaaatgattttttagataaagtgttcgtttatggataaaataataataatttgagtgagtagaaatataatggtattattaattgaaatagaaaatagagaggaagaggaggtgttagggttagaaagatgagttttgtattggatatattaagtttgtttgattaagtttaattgcgattttattgtttggaggggagtaaagtttgtttttaatgcgtagtagaatgaattagggttttggtttaattaggtaattggaaggtcgttggagatttacgttttagttatgataattgagtgattttgagtacgtttttataattatatttgttatatttttttaagtttttttaatcgtatttgtttttttttaatgttgtaattattagttatacgtgattattgagtatttgaatgttgtatggaattgagatgtgttataagtgaagaaaatatatattaaaaaatttatattaaaaaaagtaaaatattttattaataatatgtattatataatgatatttaggttaataatggattaaatatatgagggtggttttataagattataatggagttgaaaaatttttattatatagtgatagtatattatttatgtgtttgtggagatgttggtggaaacgaatttattttattgttagttgtataaaagtatagtatatattattatgtatagtatataaaattttataatgataataaaggacgatgttgttggtttatatatttagtatattatattttttattgttattaaattaaattaattaatttagttatttttgagatagagtttcgttgtgtcgtttaggttggagtgtagtgttacgattttggtttattgtaatttttgttttttaggtttaagtgatttttttgttttagttttttaagtagttgggattataggtttttgttattataatgggttaataattttttttttttttttttgcgatagagttttgtttttgtcgtttaggttggagtgtagtggtaggattttggtttattgtaatttttgttttttaggtttaagtaattttttttttttagttttttgagtagttggaattataggtattcgttattacgtttggttaatttttgtatttttagtagagacggggttttacgatgttggttaggttggttttaaatttttgattttaagtgattcgtttgtttcggttttttaaagtgttgagatgataggtagtattttgggaggttaaggtaggcggattatttgaggttaggagttttagattagtttggttaatatggcgaaattttatttttgttaaaaatataaaagttagtcgggtatggtggcgggtgtttgtaattttagttattaaggagtttgaggtaggagaattatttgaattttagaggtagaggttgtagtgagttaagattatgttattgtattttagttttggtgatagagtaagattttattttaaaaaagaagaaaaaataaaaagaaggtgtttaatgttatttgttgaatgaatgaatgaatgaaataattttatggatttgtgattttgtgattttttttttttgttcgtttgtttgttttggttttttttttaattgagatagggtttcgttgttataagtggaaagtagtggtatgattacggttgattgtagttttgattttttaggtttaagtaatttatttattttagttttttgagtagttgggattataggtgtatgttatttggttattttttttgtagagatatgattttattatgttgtttagtttggttttaaatttttgggtttaagtgatatttttatttcggttttttaaagtgttgagattataggtgtgagttattgtgttagttggatttgtgatttttaaatgtgaggaatattaggatgttttgaaaatatataatagggaaatatgatattatatgatattattttaaaggtttttttgcgtaagtgataaatgagttgatatatatagaatttcgataacgtttggtagagagtaggtatttaatatatttattggatgaatgaataaatatttaaggtaagatttgaagaatgaggaattatttttgtattagttggttttggttattataataaaatagtatagatagggaggttttaataatagaaatttatttttttatagttttggagtagagaaatttaaggttaaggtgttatgagggttggtttttggtgaggtttttttttttggatgtaaatagttatttttttattgtgttttattatggttttatttttgtgtgtgtttagggaggtagtgcggggggcggggagagatagagagagagtattttggagtttttttattttataagggtattagttttatttgattagtgttttatttatataaatttatttattaattttttttatgtttttttagggtttatttttaggttaggtatggtggtttatatttgtaattttagtattttggaaggtttaagataggaagattatttgaggttaagagttcgagattagtttaggtaatagagtgatagttttgtttttataaaaatttttaaaagttagtcgagtgttaggtatagtggtatatatttgttgttttagttatttagaatattaaggtaagaagagtatttgagtttgggagtttgaagttgtgtgagttatgattatattattatattttagtttgggtaatagagtgagattttgtttttaaaaaaaaaaaaaaaaaataataataataatatatgttatttttaaatatagttatatttagagttagggttttaatatataaattagggtagaggcgtttaattttttggtttttttgggttatagtggaaaaagaattgttttgggttatatataaaatatattaatgatagttgatgagttgaaaaaaaaaatcgaaagaaaattttataatgttttaagaaagtttacgaatttgtgttgggttgtatttaaagttattttgggttgtatgtagtttgtggtttaggggttggataagtttgaattaggggaagggtataatttattttataatagttttagatagaaaaaattgtatgggtaaaattattgatgtaggaagagttatgttttgtaagaatttagaaaaagttagtaagatttaatttaaagagaggggtggttggatatagtaaggttgaattgattattataaggagtgtttttttttttttgtatgtaagggagtcgtcgtagggtttgagggtgaagagtagtaggttagatttttggtttgaaaagataattttggttgtatcgtggagaatgggtagaaagaggtaggaatggaaatgggggggtttatcgggaggttgttgtagcggtttaggtaggtgatgatggtgattttgattagagtgaggtagtggagatggggagagtagatttaagttgtgtttatgaggatgatttggtagagtttgagattgtttgagtagtggagggagagagaggagagttggtaagggagatttttcgttttaggtaaaagagtttaagtttattgttgtttgttttagttttttagtaatatggggagaaaagggttgtaagaattaaatgagttatgtgggaaagtatttagaataatttttgatttgttgatgttattattattattattgttttatagtattgatgattgtagaaatgatttgtttttgtattcgagtattattgagttgatttattttatttatttatttatttatttatttatttatttatttatttatttattgagatagagttttgttttgttatttaggttggagtgtagtggtgagagttcggtttattgtaatttttgttttttaggtttaagagaatttattattttagtttttttagtagttatgattataggcgtatgttattacggttggttaatttttttgtatttttagtagagatttggttttattatgttggtt

SEQ ID NO: 45 - DNA, 8093 bp, Artificial Sequence
  chemically treated genomic DNA (Homo sapiens)
ttatggaaggaaatgagattagttagcgagttgatatagaataaggtagtttaaaataaatttttttaaaaatacgaagaatagatattgaagggaagaggtgtttgtaaagattaagaaagtatatttggagatggtatttttttaaagttaaagttattaagtgtttaagtgttttaaggagggtaagattattaataaggatttagtatagtagagtaatttgagtggtaatacgggatattgggaatataaatttgttaagaaaattagtaggaatgagttataggatagtaattggtaaggatttaataattttttttttaatgtacgtattttaattatatttattgttataataggattagtaataattatatttatttaaaaaaaaaaagattgttatgtagttatagaattatttaatatagaaaatagtaaaatatatttttttttttttttttttttttttttttttttataaataagattagtttatagtaaattttttatagttaagggttaatttaaaatttttggtttatattttttttttatttaatgattatatgatgtaaattaattttattaatattttaagtaaaatatattggaattttataaaatgtataagattttaatatttaaggaattggggttagaaagtagaagtggtttttaggttttttagttttttttttaagtaataaagttttgttgtgaatatttaaagttattgggaaattatcggtagatttttttgtttttttttttcggttttttattatgttgtttttttagatatgtaagtttattttattaattaaaattttagtttgattatttttgataagtatttaatcgatatgtaattttttttttgttttaaatatgtataataggatagagtttttaaatttgatttaattattaatttttgatttataagtgttatggtgagttaatagaatttattaatgtttttattgtattttattagttaaatttagaaggttggaattagttttttttatttagtattttgttagtttgtttagtttgtatttttaattttgtttttaatggtaatttgttttattttttgaaataaaataatttatattttgggagggttaattttttattgtgttaggttgttttatgtattgtaggggtgagtgtttttaggtttaaatgttaatagaagtttttagtaaatatgataattaaaaaagtgtttttatatattttttagtattttttggaatgataggttattgtttttagttgaaagttattggtataattttggtttttaagtttttatgttatttattttaattgtttagatattaattttatttaaatttttagttatagtttggttttttgaatttgttggattagtaattatagattaaggtgttttaatagttaagataggattttggaataagagtttttaaattgtataatatttgagaggatttatgaatataaattgggttttgtttataattagttttatataatgaattttaagattgtttttttatggtgaatagaagtttggaaattattgttttggtataaagtagattattttagtagaaatatagaattattgtaatttgtgaataagattgtttttaaatatttttatttgtgtgttattttatatatagaatgtgtacgatagttttaaattttagaataaatttatttttagtatttaataaaatttgatattgtattattttaaaataaagtgtttattttaggtaggattttttaaaataaagtagtaatatttacgtagataagataaaaaagttaaaatattttatattttttaattttggagtgtaattttttttttttatcgtttttgatagggttaaatttgtgtttatagtaaaaaaaaaaaaaaaaagaattattaattggtaattattaagattttatatttattatagttttttaataggtaagttgataaaatagtttttagttattaaaaaaaaaatttaaggaaaatttttaataattagttttatttttaaattgtatgaagttttttatatttgaaatttaaaaatgattttaatgattttttttattagtaatgtgttattattgaggtgggtgatggggagggaagagggaagaaatttgttagtattattttcgaatttagaaatgtttaaaaaaaagttttaaatattttgatggttagataaaatatttttattgttatgtatgggttttttttttggaaatttatgaatttgttatgtgagtttttgtaaattggtttaaaagtatatttaaggagttgataatttaagattatatgaattagaattttaatattttattaaaataagagttgaaatttttggtatttatttttagaatatttaaaaaatagattgtaaatttaatttatattaatattaaatttttttaaaattaattatattataaaagataatgattttgttattaaattaagttttaaaaaaggtggtatttttatgttttagttttatgttgttatttgagatgaaaaaaaaggtaattgttagaattttaattgtgattagtttggacggttggtatttggtatttttttataatttaaattagtaaatttgaaaatttaaattaatttttgtttttagaattaaatttttgttgagttttttaattttgtattataaagttttatggattagatttattttttttttttataaggttattttaatcgggttttattttagttgtggtaattcgaaatagggtttggagatgtttatttgttaatggttgatttaaagtgtgttggtttcgagttaaatatgaaaaagtttttttatagatttggttattattaaataaggatgttattttataggtaatttttttgataattgggtaggatttagtagataatttagtataaaattgttttaagtttttgattttgtatttattttaaagattagtgtttgtttgaagttttgttagttttatttttattgaaataggtgtatatttaggtttaaagttaaatggatttgaaaaaagttttaagttttttttaatgaatttgaggtttttaaaatgttttttaaattttttttggagacgatagattattatttgatatttattaggattaaatatttttttattttttttattttgttgttttagtttattaataatttttttgagggtaggaaagtttgttagatttttttttttaatatgtttttgaaataaatttagtttaatttcgaaagtataaatatggttaaaggtagtagtagtaaagattttattaattcgtaattttttattgagttttcgaaggtgttttataatgtttattaagaagttaaagttataaagttattgtttgtttgagaagtggattgttgttgtttttattgaaattaagaacgtttttatttttttttttagagagaatattagttttaaagtttttttttttttaagttaattgtttagatatcgtttattaatttttttattatgttttgatttagatttcgttagtaaagtttgaaatttaggtcgtttaacgtttttggttttaattaaaattatttattcggatatggtatttatgatttgattaatatttatattataggagtttaatagttttaagtgaagaaattttgaataatgaatgatattttaatagttggggtttacggtttttttttttatgtatgagacgagttttgagtttttattaattatttttaaagtatgggtcgtggttagtttaattattttttgtaagttaagttttgttgtttgtagggattttaggattgtcgatatgagcgtattaatattgaaatgatgagttaggttgattatggttagaagatttttttgtatttttaatttagggtttatatcgcggataaagattaggaggtagtttttataggttataaaagtttggtcgtttaaggtaagagaataggttttaaagtttttggttcggttaaaaagttggttgcgtagatttttgttaatgtttaggattttttgttttgtgatatttggagataagttaacgttttgtaggacgtttatatgttcgggtagtattttttttagtaatatttttatgtattggtatataaagttttttttattttagtcgcgattttttaaggttaagaggcggtagagttcgaggtttgtacgagtagttttttttttaggagtgaaggaggttacgggtaagtcgttttgacgtagacgttttattagggtcgcgcgttcgtcgttcgttatatatcgttcgtagtattcgtgtttagtttcgtagtggcgtttgacgtcgcgttcgcgggtagttacgatgaggcggcgatagattaggtatagggttttatcgtttttcggaggttttattattaaataacgttgggtttattcgggtcggaaaattagagtttcgtcgatttttattttgttttttttgggcgttatttatattttgcgggaggttataagagtagggttaacgttagaaaggtcgtaaggggagaggaggagtttgagaagcgttaagtatttttttcgttttgcgttagattattttagtagaggtatataagttcggtttcggtatttttgtttttattggttggatatttcgtatttttcgagtttttaaaaacgaattaataggaagagcggatagcgatttttaacgcgtaagcgtatatttttttaggtagcgggtagtagtcgttttagggagggacgaagagatttagtaatttatagagttgagaaatttgattggtatttaagttgtttaattaatagttgtcgttgaagggtggggttggatggcgtaagttatagttgaaggaagaacgtgagtacgaggtattgaggtgattggttgaaggtattttcgttgagtatttagacgtttttttggtttttttggcgttaaaatgtcgttcgtggtaggggttattcggcggttggacgagatagtggtgaatcgtatcgcggcgggggaagttatttagcggttagttaatgttattaaagagatgattgagaattggtacggagggagtcgagtcgggtttatttaagggttacgatttaacgggtcgcgttatttaatggcgcggatacgtttttttgttcgggtagaggtatgtatagcgtatgtttataacggcggaggtcgtcgggttttttgacgtgttagttaggtttttttttttttcgtagatcgtgtgtttttttatcgttttttttcgagattttttaagggttgtttggagtgtaagtggaggaatatacgtagtgttgttttaatggtatcgttaattaagtaaggaagttatttaatttaaaattatgtatgtagaatatgcgaagttaaaagatgtataaaagtttaagatggggagaaaaatttttttttagagggtattgtgttattgtttttttgttttttatttattttagaaattatttgtttatatttaaaggtataatttattttgagttttttttaaaataaatcgtttgtagttttaggataggttgatgtattttgggtttgatttttgattattttattgttaaattagtgattttttttagtgtttttttgttttttatttcggaggacgtatttcgaagatattagattttatgggttatttttggattttgaagtttataattgtgataaaaaatgtgaagggaagagatttgaaatatgtggaaggaaaagtgagtgtagattataaatttttaaaaagataagtttaaaatatatttaaacgttatgttagattattttgttaaaattagttgttagtgacgttcgtacgttaatagaaaaaagaatgttttagtttggagtggtaggtttttagagggatttattgtgaaagtataaattatttagggtaatgggattgagagaatagtgggtagaaaggattattgaaggaaaggaagagaattggaaggtagatgaaagaaggagtaagaatttggggatgtttttttttttttatttgtaatagtagtaatagaagtaatggtagattggtttttgtttttattgtgttagaatgaattgataggataattgggtttattattgtattgtgttagaatattgtaaaataaaattaaatatattagtttggtggtttgtaattaattatttaagtggagatttttattttttttttattttttttttagacggagttttattttgttatttaggttggagtgtagtggcgcgattttagttgattgtaattttttttttataggtttaagggagatttttttgttttagtttttcgagtagttaggattataggtatgtgttattatatttggttaattttgtatttttagtagagatgggatttttttatgttggttaggttggtgttaaaattttcgattttaggtgaatcgtttgttttagttttttaaagtgttgggattataggcgtgagttatcgcgttttgtagttttttgtatttttaatagagatagggttttattatgttagttaggatggtttcgattttttgattttaggtgatttgttcgttttggttttttaaagtgttgggattataagtatgagttatcgcgttcggtttaagtggagatttttatatggagtttagttatattttttttaatatataagttgagatgattaatataattttaatataggggtttatgagaaatgtttgtaatatttaagtaatttattgtttttttttttttttttttaagatgaagttttattttgttgtttaggcggaagtgtagtggcgtgattttggtttagggtaatttttgttttttggttttaagcgatttttttgttttagtttttcgagtagttgggagtataggcgtgtatgattatattcggttaatttttttatttttagtagagacggggtttttttatgttggtcgggttggttttgaatttttgattttaggtgattcgtttattttagtttttttaagtgttgggattataggtgtgagttttcgtgtttagtttattattttatttttgaataaagaattgtttgtgtggggaatagataatttttttttatgtagtttttgttagaaaatttgttttttttagtagttggtttgtgtttataggttattttttgaaagtataaaaaatttattgattttttttttttgggtttttttttttttttgagatagagttttgtttttgttgtttaggttggagtgtaatggcgcgattttagtttatcgtaatttttattttttgggtttaagtgatttttttgttttagttttttgagtagttgggattataggtatgcgttattatgtttggttaattttgtatttttagtataaatggggtttttttatgttggttaggttggttttaaatttttgattttaggtgatttattcgttttggttttttaaagtgttgggattatgggtgtgagttattgcgtttggttagaaaatttattgattttttaaagatttattaattttttgtattattttttttttttttttttatcgtaaatataaaagggaatagtagagaaaattatttagaattttattttttagtgatattatttagtgatattttattagagttatttaggaatttgaggttgaataaagtttaggtaaaagtaaaattagttgagaagagatatttgttaaaagaaatttatttttaattttatttgttgttttttttagaggaatagaaatagtgttgaatgttttattagaaatgatggttgttttgttcgtttttttttttttttttatataatatgtaaatttatatagtgtatgagtttgtaagataaaggaaaaatacgttaatgaggtattattgtttgtatttggagtttgttattattgtttggtttatattaaaatatgtatattagagtagttgtagattgataaattattttttgtttgatttgttagt

SEQ ID NO: 46 - DNA, 8093 bp, Artificial Sequence
  chemically treated genomic DNA (Homo sapiens)
attggtaaattaaatagaaaataatttattagtttgtaattattttaatgtatatattttaatatgagttaagtaatgataataaattttaaatataaataatagtgttttattaacgtgttttttttttgttttataggtttatatattgtatgagtttatatattgtgtgagagagagggaagagacgggtagagtaattattatttttaataggatatttagtattatttttgtttttttaggaaagatagtaagtgaagttaaaaatagattttttttggtagatgtttttttttaattaattttatttttatttgaattttatttagttttaggtttttaagtgattttaataaaatgttattaaataatgttattaaaaaataaaattttgaatgattttttttattatttttttttatatttacgatggaggggaaaaaaaaaagtaatgtagaaagttaataaatttttaggaagttaatgaattttttggttaggcgtaatggtttatatttataattttagtattttgggaggttaaggcgggtggattatttgaggttaggagtttgagattagtttgattaatatggagaaattttatttgtattaaaaatataaaattagttaggtatggtgacgtatgtttgtaattttagttatttaggaggttaaggtaggagaattatttgaatttaggaggtggaggttgcggtgagttgagatcgcgttattgtattttaatttgggtaataagggtaaaattttgttttaaaaaaaaaaaaaaatttaaaaaaaagaagttaataaattttttgtgtttttaaagagtagtttataagtatagattaattgttagagaaaataaattttttagtaggggttgtatgagaaagagttatttattttttatatagataattttttatttagaaataagataataggttgggtacgggggtttatatttgtaattttaatatttggggaggttgaggtgggcggattatttgaggttaggagtttaagattagttcggttaatatggagaaatttcgtttttattaaaaataaaaaaattagtcgggtgtggttatgtacgtttgtatttttagttattcgggaggttgaggtaggaagatcgtttgaaattaggaggtagaggttgttttgagttaagattacgttattgtattttcgtttgggtaatagagtaagattttattttaaaaaaaaaagaaagaagataataagttatttaaatattatagatattttttatgagtttttgtattgaagttgtattagttattttaatttatatattaaaaagagtataattggattttatataaaaatttttatttgagtcgggcgcggtggtttatgtttgtaattttagtattttgggaggttaaagcgggtagattatttgaggttaggaaatcgagattattttggttaatatggtgaaattttgtttttattaaaaatataaaaaattgtagggcgcggtggtttacgtttgtaattttagtattttggaaggttgaggtaggcggtttatttgagatcgagagttttgatattagtttgattaatatggagaaattttatttttattaaaaatataaaattagttaggtgtggtggtatatgtttatagttttagttattcgggaggttgaggtaggagaattttttttgaatttgtgaggaggaggttgtagttagttgagatcgcgttattgtattttagtttgggtgataaagtgagatttcgtttaaaaaaaaaataaaaaaaaaataaaaatttttatttaagtaattaattataagttattaagttagtatgtttagttttgttttatagtattttggtatagtataataataggtttagttgttttgttaatttattttaatatagtagaaataaaagttagtttgttattgtttttgttattattattataagtgaaaaggaaaaaatatttttaggtttttgtttttttttttatttattttttaatttttttttttttttttagtggttttttttatttattgtttttttagttttattgttttgaatagtttatatttttataataaatttttttagaaatttattattttaaattgaagtatttttttttttattaacgtacggacgttattaataattgattttaataaaataatttgatataacgtttaggtgtattttgggtttgtttttttggaagtttatagtttgtatttatttttttttttatatgttttaaattttttttttttatattttttgttatagttataagttttaaaatttaaggatgatttataaaatttggtattttcgaagtgcgtttttcgaaataaaggataggaaaatattaagaggggttattaatttaataatagggtaattagaagttaagtttaaagtgtattagtttgttttaaaattataaacgatttgttttgaaagaaatttaaaatgaattgtgtttttggatgtgaatagatgatttttggaatgaatgaaaagtaagaaaatagtaatatagtattttttgaaaaaaggtttttttttttattttaagtttttatatattttttaatttcgtatgttttgtatatataattttaaattaagtggtttttttatttagttaacggtattattaagataatattacgtatatttttttatttatattttaaataatttttaaaaggtttcgggggagagcggtaaagaaatatacggtttgcggaaaaggagaaggtttgattggtacgttagggaattcggcggttttcgtcgttgtgggtatgcgttgtatatgtttttgttcgggtaaagaggcgtgttcgcgttattgagtgacgcggttcgttaagtcgtagtttttaagtgagttcggttcgatttttttcgtattagtttttaattatttttttgatagtattagttggtcgttggataatttttttcgtcgcgatgcggtttattattgtttcgtttagtcgtcgaataatttttgttacgaacgatattttggcgttagaagagttaaggaaacgtttagatgtttaacggaagtgtttttagttaattattttagtgtttcgtgtttacgttttttttttagttgtagtttacgttatttagttttattttttagcggtagttattgattggatagtttgaatgttagttaaattttttaattttgtgggttgttgggttttttcgtttttttttgaagcggttattgttcgttatttagaaggatatgcgtttgcgcgttagagatcgttgttcgttttttttattggttcgtttttaggagttcggggaatacgaaatatttagttaataggagtagagatgtcggaatcgggtttgtgtgtttttgttgaggtgatttggcgtagagcggaggaggtgtttggcgttttttaggttttttttttttttttgcggtttttttaacgttggttttgtttttgtggtttttcgtagaatgtggatgacgtttaaaagaagtaagatggaagtcgacgaggttttagtttttcggttcgagtggatttagcgttatttggtggtggagttttcggagggcgatggggttttgtgtttggtttgtcgtcgttttatcgtagttattcgcgaacgcgacgttaggcgttattacgaggttgagtacgaatattacgagcggtatgtggcggacggcgagcgcgcggttttggtggagcgtttgcgttagggcgatttgttcgtggttttttttatttttgaagagagagttgttcgtgtaggtttcgggttttgtcgttttttggttttgaagggtcgcggttggggtgagggggattttgtatattagtgtatggaggtgttgttgagagaggtattgttcgagtatgtaagcgttttgtaaggcgttgatttatttttagatattataaggtagaggattttgagtattgataggaatttacgtaattagttttttaatcgagttagggattttaaagtttatttttttgttttggacgattaggtttttgtggtttatgagaattattttttggtttttattcgcggtgtaggttttgagttggaggtgtaagaagattttttgattataattaatttgatttattattttagtgttggtgcgtttatgtcggtaattttagagtttttgtagatagtagggtttagtttgtagagaatggttggattgattacgatttatattttgaggatgattggtgagaatttaggattcgttttatatatgagagaaaaggtcgtaagttttaattgttggaatgttatttattatttaggatttttttatttggaattgttgagtttttatgatgtagatgttaattagattataaatattatattcgaatggatagttttgattaagattagaggcgttaggcgatttgaattttagattttattaacggaatttgaattagagtatggtgaaagggttaatggacgatgtttgaataattggtttaggagagggaaaattttaaaattaatattttttttaagaaaagaaatggaagcgtttttggttttagtaggggtaataatagtttattttttagataaataatggttttgtgattttggttttttggtggatattatggaatattttcgagaatttagtgaagaattacgagttagtaaagtttttgttgttgttgtttttgattatatttgtattttcgaagttaagttgaatttattttaaagatatattgaggaaaaaaatttaatagatttttttgtttttagagaagttgttgatgagttaaaatagtaaaataaggaagatgaaaaaatatttgattttgataggtattaaatggtgatttgtcgtttttaaaaagaatttgagagatattttaaggattttaggtttattaaaaaggatttagaattttttttaaatttatttaattttaaatttgaatatgtatttattttagtgagggtggagttaataaaattttaggtaaatattaatttttggaatgaatatagaattaaagatttggggtagttttatgttggattgtttgttgaattttatttaattattaaaggggttgtttgtaaggtggtatttttgtttgatagtaattaaatttgtgaaaaggtttttttatatttgattcgaaattaatatattttgagttagttattaatagatgagtatttttaagttttgtttcgggttgttataattgaaatggagttcggttgggatgattttgtgagagaaagaaatgaatttaatttataaggttttgtagtataagattgaaaaatttaataagaatttaattttaaaagtaaaaattggtttgagtttttaagtttattaatttggattgtgagaaagtattaagtattagtcgtttaaattgattataattaaaattttgatagttgtttttttttttattttaaatggtagtatgggattgaaatatgagaatgttattttttttaaaatttagtttagtgataaagttattgttttttatgatatagttaattttaaagagatttagtattaatgtgagttgaatttgtagtttgttttttaggtgttttgaagataaatgttaaaaattttagtttttattttaatggagtgttaaaattttgatttatatagttttaaattattaattttttaaatgtgtttttgaattaatttgtagaagtttatatagtaagtttataagtttttaaaaaggaagtttatatataatagtggaggtgttttgtttaattattaaaatgtttgagatttttttttaaatatttttgagttcgaaggtaatattgatagatttttttttttttttttttttattatttattttagtgataatatattattgatagaggaagttattagaattatttttaagttttagatataggagattttatgtaatttggagataagattaattattgggggttttttttggattttttttttaataattgggggttattttattagtttgtttattaaaggattatggtaagtatagaattttaatggttgttagttagtaattttttttttttttttttttattgtagatataagtttggttttattaaaaacgatgaggaaaaaagattgtattttaggattaggaggtgtgagatattttagtttttttgttttatttgcgtgggtattgttgttttattttaaaaaattttgtttaaagtaaatattttgttttaaaatgatatagtattagattttgttagatgttagaaatggatttattttaaaatttggaattgtcgtatatattttatatgtaagatagtatataagtagaaatatttaaaagtagttttatttatagattgtagtaattttgtatttttattaagataatttgttttgtgttaaaatagtaatttttaaatttttgtttattatgaaaaggtaattttaaagtttattatgtaaaattaattataaataggatttaatttatatttatagatttttttaagtattatataatttaaaaatttttgttttaaagttttgttttaattattgaaatattttaatttgtggttattaatttagtaaatttaaggaattaggttatgattaagaatttaggtggaattgatgtttgggtaattaaaataaatggtataagagtttaaaaattaaagttgtgttagtggtttttaattagaggtagtaatttgttattttagaggatgttgagaaatgtgtaggggtatttttttggttgttatatttattaggggtttttgttggtatttaagtttaaagatatttatttttgtagtgtatgggatagtttggtataatgaagaattagtttttttaaaatgtagattattttattttaagggatagggtagattattattagaagtaaaattaaaagtataagttgggtaaattgatagaatattagataggagagattaattttaattttttaaatttggttagtaaagtgtaataaaggtattgataagttttgttagtttattatagtatttgtaaattaggaattaataattgaattagatttaagggttttgttttgttatatatatttaaggtagaaaaaaagttatatgtcgattaggtatttattaagaatggttaagttgagattttggttaatagagtaagtttatatatttagagaaataatatagtggaaaatcgaaaaaaaaaaatagaaaaatttatcggtaattttttaatagttttgaatatttatagtagagttttattatttgagagaaagattggaagatttgaaagttatttttgttttttaattttagttttttaaatattgaaattttgtatattttgtgaaattttagtatgttttgtttaaggtgttaataaaattagtttgtattatgtagttattgagtgagggggagatataagttaaggattttaaattgatttttagttatagagaatttgttataagttagttttgtttgtaaaaaaaaaaaaaaaaaaagaaaaagaaaaaagtgtattttattgttttttgtattaagtaattttgtaattgtatggtagtttttttttttttaaataaatatagttgttattggttttgttgtagtagtgaatatagttaaaatacgtatattaaaaaaaaaattattaggtttttattagttattgttttatagtttatttttattagtttttttgatagatttgtatttttagtgtttcgtattgttatttaaattgttttattatgttaagtttttgttaatagttttattttttttgaaatatttgaatatttgatgattttagttttgaggagatattatttttaggtgtgtttttttagtttttgtaggtattttttttttttaatatttgtttttcgtatttttaaaaaaatttgttttagattgttttgttttgtgttagttcgttagttgattttatttttttttatgg

SEQ ID NO: 47 - DNA, 5278 bp, Artificial Sequence
  chemically treated genomic DNA (Homo sapiens)
atatttagtgtttcgatagtttgtacgtgttattttttttatgttaggtttatagttagagataggatagtttttatgtttagtattattgatttgttagggataagtaagttttatcgggtttggatgtttagattaggttggtagggttagaagtggtgttttttttggaaagttggggattgggtttgtttttaaagtatgttatagttgggtatttggtgttagtaggttttttttttgtagtggattttgttagattttatttagattcgttttaagatttagatatttatcgttagttgttaggagtattagttatagttggtttagagttgaaatttttcgtatttaggagttatttttagtggggagtatgttttagtttgtttttgtaggtaaatttttagtttagagtttgtgtttaggaatttttaggtttttagtttattttggttttttgagtgaggttattagaaggatgattagaggggggtcgatatacgtgtgtttagtgttaggtttttgagtttaagtttgtacgtatatatttagatgaagtaagtgaagaattataaaagaagtgaaaatggtcggtttttgttttaattgatgatattattttgtgaaatttttttttttggtttagaagtttttttattgaggtattttgtgatttttattttttttcgttatagaataattttttttgattgtaattttttattgttcgtttaaattttataaaacggttttattttattttttttttttgattttttttttttcggatttagttcgtttgtatttaggtgaaataaatagttttgttgtttatataaagtttgtttggtggtttttttatacggacgcgtacgaaatttaggattgtatttagtttatatagataagtgtgtgtatatatgtgtgttttgttttttgtttgttttattattttttgttttggtggaggagttttttatacggaaatttagttttcggttttttttttttcgcgttatgtattttggagaaatggaaattagttgtagttgtttagtattttcggggttggtgggtaggcgtttgagaatgggttagggttagggtttagattaaatttagggtttgtggtttttatattaggatacgagggaatgggagttttgattagtaagaggagtgtttttaatagttattttagaattttttgttattttagaatttttagtttagtttttaggttataagtaattatttaaggggttagattttgggttttggggagtttttggaaggattagaagaaatcgttcggggagtagggttttagggatgggtttatgattagtttttggttatttggggaagaggtagaagggggttaggttagttagtgttttgaagttataggttatttttgaggtagttgttttttttttatattttagggtttggtaaggggtttttataagtatttgggtttagggtttggtagtatagttttaggtagggaggatgtagtttatatatatttaatttcggtttgtttagtggttgttttttttgtttaaggaagttttggttttttagggtttattagatatagatggtcgtagagattagttaagaggttagtagttattttgttgggaagttgttagtttaaagttgtgtagaggagtttatgggttttgatttgatatttattttaatagttgttagtatttttttttattagagagaagacggagttagtgtgttgggtattttggggttataaggttgatattagaattttggtttttgtagttaatatagttatattttttaaagatttgtttataaaggttttagcgattgatggttatattttttatagttggaggtagttttagtttttttatagtttgtggtttattgtggaggtcgggggttagggttgtttattttagtattaatattagtttttattttttttaaagttttaagggtgtttttatttttattttttattgatatttttgttttttttaataagtttgttttagtttagtagtgggataaattggggatagaggaagttttaggttttttttttttatttggtattatttttttttgttttggattagttcgttagtttattttgtaggttatagttggaatttttattttatcgtttttagtttgtggtgggagtatgagattataaattaggaagtggggggggggagtgtttagagattgcgtaatttttagtatttagtttagaatatttggagaagttggttgttggcgtttcggtgtcggtttttttattttttggggtaggggttaatttgttttttaagtgattttttttttttataagaaaggtggggataaaaatatttttttgggagtttttggatttttcgtgagttttgtaaggattatgtattatttgtaatattagaataaatataagtataaagtaatatttattttttttttgtttattaagaggataaaggtttaattggggttttagtttttttattagattgagggggagtattcggggggatggggggttgtttttataggaaggagagatttattgtttgggaggtatggttgtagataagtagggagggtgtggaattatatttagggttgttttataaatacggattgatgatatattatgtttttatttcgggaagcggtatatagtgttataaatagttggtggtttttagtcggttgatggtttttttttttttaggaagttttggttggggtttatgggggtgggacggttggttagaggaggagaggtagttggagattaggttttgttttgttagtttttttgtaggattaggtgttatatttatttgagggttttagatatatggtttgtgcgtttgttttgtttagcgttttttatttgacgcggttaggtgtttagttgttttttaaggtttttttaggtgtttttttttaggattagggttatagaagttaaagtttaggaaaagtttttcgagggtttttgtgcggtagaggtgggttgtggggtgggattgtgtttgttatagtggaggggttttgtagatttagataaatttttaagtggttagaagcgggggatggttttgttgggtgttggggttgttatgggtcgtgggagttagtagtgtgtttagtttttttagggttcgttttttaggttttttcgtttattgggttaagtatcgtttttgtttttttttaggggtatggatttgatttgagaggttgtgagagtttataggcgttgggtcgtcggggaggttttagaagcgtaggacggttgcgtattgtcgggtcgtgtttagttttggtttggtttcggtttttagaggaggttgtttgcgttttagtaggtttaatttagaacgtgggcgagttttttttagtatttttgggcggaaagagggatgggggttttgttgtagaggtagaattcgcgtcgttttttttttttttttttcgattagtttgtgataatttcggttaggggcgggggttttcgtataagtttggcgtttattttttggataaggatttttcggtttatttcggattagggttggggcggttttttaggcgtttatttcgttggtattttatcggaaaatacgtttgcggttcgtttttttttttaaagtacgattatttcgttcgggtttttcgaggatttatttaggtttacgacgggttcgttttttcggtggtttgattatcggttggtggagtgggttttggggtcgttaggcgattagggcgtaggcgggggcggatagtttattgggaggggcgtcggggtatagtgcggggttcgttttatttttaggtgtttttttttcgttttcgtttcgtaggtatcgtatcgggttcgggaatcggttcggatttggcggtgggcgttgggaagaggatttatttttacgtggttcgtttcgtttcgggggcgtagttagttttcggcgtttattgttttttttttttcggttttcgtttttttttgcgtaggcgtcgtttcgtttcggttttaggggtgttttcgtggtcggcggttgttgggtttcgcgtcggggttcgagttttacgaagtttcggttcgagtcgtcggatgttcgcgcgtagcggggtttaggtgagcgcgcgtttcggtcgtttcgcggaatagacgcgtttatttttaggcgtagtagcgagcgcggtcgcgggagcgggagtgtcggggacgggcgtagcgtttatcgtttcgagggttcggggtagagttagagtataggttaagggttaagttcgggtcgagagtagtggtcgtagcgttcgggggttgaatttacggcgcgttggtagcgcgggtcgagttgcggagacggttacgttagcgttcgttttaggtcgattggtagttttcgttttatattaacgttagtattttcgttaaaaataatgtattttttttatgttaggaggatttaggtgttgttaaagattagtttttcgggtgttgttaggtcggcgtttattcgttatttttattttttttttttttttgttttaggatagtcgaggatgtgtggttaggttttttttatttatggggaggttagaggtgggaggttggcggtttgttcggttttagtagatttttttagttttttaggagattttgtttttgttttatttgttcgttatttagtttgggttatgaagtagaggatagttagggattttgagtacgcggtggttatttcggtgtttatttttttttgtgtgttcgattttggttttgttaagattttgtgttttgaattttggtaagggttggatgaaagggtagggttttagaaattagtttagacgtttgtttgggatttgtatgatgagtgggaatcggagggtattagttttgttgttttaggtttaggtttttatttgttttttaggttatgtagtttgggtttttatgtcgtgtagttcgtatatatgtggggtagagtagttattttgtttttagtagtagtcgtttatcgttagacgtgattattttttgaggtttcgagtgtgttagggtgtttgtgttttataataatttataggatggttattttcgttttgtagatgaagaaattaaagtaggtggttagatttagtttttgtattttttgagtttgattttattatatagttgttttttattcggatgtttatttatttttttttttattatagt

SEQ ID NO: 48 - DNA, 5278 bp, Artificial Sequence
  chemically treated genomic DNA (Homo sapiens)
attgtaatgggaaaaaaaataaataagtattcgaataggagatagttgtgtggtaaggttaggtttaggaagtgtaaggattggatttgattatttgttttggtttttttatttgtaaagcgggggtgattattttgtgggttgttatgaggtataaatattttgatatattcgaggttttaggaaatgattacgtttgacgatggacggttgttgttgggggtagggtggttgttttgttttatatatgtgcgagttgtacggtatgggggtttaggttgtatgatttggggagtagatgggggtttgagtttgggatagtagggttggtgtttttcgatttttatttattatgtaggttttaagtaaacgtttgagttggtttttggagttttgtttttttatttaatttttgttagaatttaaaatataggattttagtagggttaaggtcggatatatagggaggggtgagtatcggggtgattatcgcgtgtttagggtttttaattgttttttgttttatggtttaggttggataacgagtaagtggggtaaaggtaaggttttttgagggattaggagggtttgttgagatcgagtaggtcgttagttttttatttttggtttttttatgggtagggggaatttaattatatattttcggttgttttggggtaaaggagaagggaagatgaaggtggcgggtgagcgtcggtttggtagtattcggagggttggtttttagtagtatttaagtttttttggtatgggagagatgtattatttttaacgggagtgttgacgttaatgtagaacggagattgttagtcggtttggaacggacgttgacgtgatcgttttcgtagttcggttcgcgttgttagcgcgtcgtgggtttagttttcgggcgttgcggttattgttttcggttcgagtttggtttttggtttatgttttggttttgtttcgaattttcggggcggtgggcgttacgttcgttttcggtattttcgttttcgcggtcgcgttcgttgttgcgtttgggggtgggcgcgtttgtttcgcggggcggtcgaggcgcgcgtttatttgggtttcgttgcgcgcgggtattcggcggttcgggtcggggtttcgtgggattcggatttcggcgcggagtttagtagtcgtcgattacggaagtatttttaggatcggggcggagcggcgtttgcgtagaaggggacggaagtcgggagaaggggggtagtgagcgtcgggaattggttgcgttttcggggcggggcgggttacgtggaggtggattttttttttagcgtttatcgttaggttcggatcgattttcgggttcgatgcggtgtttgcgaggcgagagcggggaaggggtatttgggggtggggcgagtttcgtattgtgtttcggcgttttttttaatgagttgttcgttttcgtttgcgttttggtcgtttggcggttttagagtttattttattagtcggtggttagattatcgagaggacgggttcgtcgtgaatttgagtggattttcgaggggttcgggcggagtggtcgtgttttgggggagggggcgggtcgtagacgtgtttttcggtggggtgttagcggagtgagcgtttgggaggtcgttttagttttggttcggagtgggtcggggagtttttatttaggaagtggacgttaggtttgtgcggaggttttcgtttttggtcggggttgttataggttggtcgggggaaggaaggagggagcggcgcggattttgtttttgtagtagagtttttattttttttttcgtttagggatgttgaagggagttcgtttacgttttgggttgggtttgttggagcgtaggtagttttttttagaggtcgaggttagattagggttgaatacggttcggtagtgcgtagtcgttttacgtttttgaggttttttcgacggtttagcgtttgtaagtttttataattttttaagttagatttatgtttttagggaggggtagggacggtgtttggtttagtggacggaagggtttaggggacgggttttgagggagttgggtatattgttggtttttacggtttatggtagttttagtatttagtagagttatttttcgtttttggttatttgaaggtttatttgggtttgtagggtttttttattgtggtaggtataattttattttataatttatttttgtcgtataaaaattttcgaggggttttttttgagttttgatttttgtgattttggttttggaaaggagtatttgaaaaggttttgaagagtaattgggtatttggtcgcgttaggtgggagacgttgggtaggatagacgtataggttatgtgtttggagtttttagatgagtgtgatatttggttttatagaaaggttaatagggtaggatttggtttttaattgtttttttttttttgattagtcgttttatttttatgggttttagttaggattttttggggagggaggggttattagtcggttggaagttattagttgtttgtagtattgtgtgtcgtttttcggggtgggggtataatgtgttattaattcgtgtttataaagtagttttggatgtgattttatattttttttgtttatttgtagttatgttttttaaataatgagttttttttttttgtgggaatagttttttattttttcgagtgtttttttttagtttagtagggaaattgaggttttagttgagtttttgtttttttgatgggtagggagaggatgggtgttattttgtatttatatttattttgatgttataagtgatatatggtttttgtagaatttacggggagtttagaggtttttagaggggtgtttttatttttattttttttatgaggaaagagaattatttggagagtagattggtttttgttttaggaggtggagaggtcggtatcggggcgttagtaattaatttttttagatgttttggattgagtgttgggggttgcgtaatttttgggtattttttttttttattttttggtttgtggttttatgtttttattataggttggaagcggtgggatgagagttttaattgtggtttgtagagtgggttggcgggttggtttaggataagagaaagtggtgttaggtgagaggagggggtttggggttttttttgtttttagtttgttttattgttgggttggaataggtttgttggaggaggtaaggatattagtggaagatggagatgagaatatttttgaggttttgaaaggagtgaaggttagtattggtgttggggtgagtagttttgattttcgatttttataataggttataggttgtggaggggttggagttgtttttagttgtaggaggtgtggttattagtcgttggagtttttataaataagtttttgagagatgtggttgtattggttataggggttagggttttagtattagttttatgattttagggtgtttagtatattggtttcgttttttttttgatggaggggggtgttgatagttgttgaggtgggtgttaggttagagtttatggatttttttatatagttttgagttggtagttttttagtagggtggttgttggttttttgattggtttttgcggttatttgtgtttgatgagttttggagggttaaagtttttttgggtagagaaggtagttattgggtaggtcgaggttgggtgtgtgtgagttatattttttttgtttggggttgtgttgttaggttttgggtttaggtgtttatgggaattttttgttaaattttgggatatggggagggggtagttgttttagaaatagtttatgattttaggatattggttggtttggtttttttttgttttttttttaaatagttaggagttggttatgggtttatttttggagttttgtttttcgggcggttttttttgatttttttagggattttttaaagtttagggtttgattttttgggtgattatttgtggtttagaagttgagttgaggattttggggtagtagaggattttggggtagttgttgggaatattttttttattggttagggtttttattttttcgtgttttggtgtgagggttataaattttgggtttggtttagattttaattttaatttatttttagacgtttgtttattagtttcgggagtgttgggtaattgtagttgatttttatttttttagggtgtatgacgcgggaagagaggggtcgggagttgggttttcgtatagggggtttttttattaggatagagagtagtagggtaggtaggaggtagagtatatatatgtgtatatatttgtttatgtggattgggtataattttgagtttcgtgcgcgttcgtgtgaagagattattaagtaggttttgtgtgagtaataaggttgtttattttatttgggtgtaggcgggttgagttcgaagaaaagagagttagggaagggagatggggtgggatcgttttatagggtttgggcgggtagtggaaaattatagttaaagggggttgttttgtggcggggaggagtgggggttataaggtgttttagtgggggagtttttgagttaggagaaggaattttataaggtaatgttattagttaaggtaggaatcggttatttttattttttttgtgattttttatttgttttatttggatgtatacgtgtaggtttgggtttagaggtttgatattgagtatacgtgtatcgatttttttttgattatttttttgatgattttatttaggaggttagggtgggttgagagtttggggatttttggatataggttttgagttggggatttgtttgtagaggtagattggggtatgttttttattgaaggtgatttttgggtgcggggggttttagttttgagttagttgtgattggtgtttttggtagttggcgatgagtgtttgggttttggagcgggtttaggtggggtttgatagagtttattgtaggaggaagatttgttgatattagatgtttagttgtggtatgttttggaggtaagtttagtttttagttttttagagaggatattatttttggttttgttagtttagtttgggtatttaggttcgatagggtttgtttatttttggtaggttaataatgttaagtatggagattgttttgtttttggttgtgagtttggtatgggaggggtggtacgtgtaggttatcggagtattgagtgt

SEQ ID NO: 49 - DNA, 6565 bp, Artificial Sequence
  chemically treated genomic DNA (Homo sapiens)
  unsure (600, 657): n is a or g or c or t
tttttttatttgaggttaggttaatttttttgatattagttaaggattcgtttttatattttttaggtatcgttttgttttgttttaatttttattttttgtagtatttgattacgtggtatttatagttatttaaagtaggatgtaaataggaatgttttgagagatttgattatagtttttaaatttttaagtttatgatttgtagtatttgtttacgaggatcgatgtgttttttggttttaatggggagttattggattttttattttaggaaggtgtttaatagttgttgtggatggttttattgtttaggtttagaattagttagaagggaatttttttttttattattattttttatgtgtttaagtttagttgattgggtgtttttatttatgtatttttttatttagtgatttttgttgttgtttttagttaggaatttttttttttttatattgaaatgttaatattagaatttgggtttagtttttgtagtagaatggtttttgtatagttagattagttttgtttagaaaaagggtttttattttttttttttttagagtttagattaattttttaggaatttgttgngtttggagaaaatttttagatagtagggttgtttaattttgttttgttttttgtggngggttatatatagatttttattatatttttatttttttaagtttgttttttatttttaattttagtattgtttatatagttttgttattatgttaaatgattatggttatttatttatgggtttttgggatgcgtattttgtttttgttaaattggggattgtgagggttttagatatgtggtgcgttttggcgggggtttattgttggggatggaggaaggatcgatggaggcgcgacgcgagtggttgggttgggttttttggttgtttcgggggggcgttggggattggtgggtggggtggggggcgggtggggttgggggagggcggcgcggatatttttttttttgttattatgtgaagaaggatgcgtttgtttttttttttattatgattttaaattttttgtggtttttttagttatgaggaattgtgagttaattaaattttttttttgtataaattgtttagttttgggtagttttttataagaatatgagaatggattaatataggtttaattttggttattttttaattttttaagttattggagttgattttttgggtagttttaatatgattattttttttattttttagttattagggtatattaggttttatgaattattgattttaatttttgggttggaggataggaaaatttttagtagaggttaattggagatattcgtttttttttaggatttttagaattattttaatattttgaaatgttttatttttagatattgggtaatgaatgttaagtataaaatattattgggtattgtggttaattaggaataatagagtagaagattatgatttattttagtttattttaaaatttatattttattgtatttagggttgggtttagaaaggggattattatttaattttagtaagttttaaaaaatagttgttttgattttatgtgaaattataggttattgattatattgtataatttatatttgggtttattgaatgatggtttaagataatttgtaaatttgatattatagtgagttatttaatgtttaatgtaattttttaaggtgatgaaattaattatttaggtagtagaataagttattgttatgtagtataaataattgtttattaattttttataattatttttgtgatattaagtagttttattaatagttttttttatataattttattttattatatattgatttttattatgagatatgatttttttgtggtgaatttatgttaaggtatttatttgagttttttgttgagaattaaattaattttattttttaaaggtcgattttttttaggaatggagaatttaggtttttttatttataattattagattttgttatttataaaattataaagaaagtttaagtatattttgggaatatatatatatttttatgtattatatataatatgtttttgaataatatcgtttttttttaacgttgatgagaaaaataattaatttttggttagggttatcgtttgtgtggagtttgtatgttttttttatgtttgtatggggtttttttaggtattttagtttttttttatattttaaagatatgtatattattttttttaaatgtatgtatagtttatatttattttagtgttttttattagaagtgtttttggtttttatttagaagtttggtgatgtttttgtgattagtaatatgttttaggaatttaatttttgtgtatatttagtagtttatggtaaaattggttttgttttatattgttttatttaaagttatagtttttaagaatttatagatgatattgaggattatttatgtgtatagatatgatggatattttgatatttagtggattttttttaaaaaattgaatttaaaagttttattaaaatttatatttattatttattatttaaatttaattatttttttttttggtattatttaatttatatttaatatttagttttaattatttgtaattgtgtatgatatagtaaagattttggggaggttaagatgggtagattacgaggttaggagatcgagattattttggttaatacggtgaaattttatttttattaaaaatataaaaaattagttaggtgtggtggtaggcgtttgtagttttagttatttaggaggttgaggtagaagaatggtgtgaattcgggaggcggagtttgtagtgagcgtagatcgtattattgtattttagtttgggcgatagagtaagatttttttttaaaaaaaaaaaaaaaaaaagattttgagttaaagtgtttaagttgaatgtattttgttatttataagataaatcgtgttaattttttgtggtttattttatttataaaatagagataataatagtttttgtttttagggttgttgtgggaattaaagatttagaataatgtttagtttttaattagtgttgttataattgtttgatataattgtattatatttgtgtattttgtagattgatattaaattatatttttaaaaataggtgtttaatgttttatttaattattttaaaatatgtttaattatgtttttattttatttttataatatttttataaaaattttttatatatagcgtttatttttggtttagttttttaggaaaataattttgagagttagttatttgaattaaagaaatattaatattattagattatattgggatttttgagattggtttttattaattttttagttacgggtttttgttattatttttattagtgatttaagtgttaaatttaaatgttttgtatttgttttattaaagagatgtagtatttgttttttttttattgtttttattttttttgttatgtttttttttataattataaatatttaggttttttaggttttaaacggggtattttttaatttttatatttttttttttggttatttttttttttttaatagtttaatttatttagatttttacgtttgaaattattttagatgttttagaggcgttttattattataatggtatattattttttatttttttatatgttacgttagtttttaaattgaaaatttgagcgtttatttttggtgtattatttttaaattttagatttttaaaatttagggttatgtaattttaaaaaatttttatttttttttttttattgtttttgtttaggttttattttttttagtagttgttttaaaggtttattttgtttttttttcggagtgttaatttttatcgaagtttttatttagttgttaattttgttttatgtttgataatttgttcgtgcgttgatatatataaaatttttaagataaaaattttttaataatggtaaatgaattttgggaattgtatatagattatatagatttataataagagaaaaggttttagattaatacggaaaattttttatttaattaatatttgtattggtaaattttattaagtaagattttatttaattttatattattttttattgaagaggttgtggttattttttggaaatatttgaatttatttttataagttagagaaatagcgttattcgaaatattattttttgggttcgagttttaaggtatttgataaacggagcgttgtgggtaggggtgaggtgttttttttagggttgggattttgttttgggcgagggcgtcgtagggtaaagattttatcgggtagtagaattcgggtagaaattagtaattgggtttttcgcgtagtagaaaaggggaatttagtcggggtttattttttttgttagcgtagatcgtaagtttggttttattttttcgtcgggagtcggtttggcgcgtttcgtttaggtatttcgatcgtgggtagtttgcgttcgtttgggttttatcgtttcggttcggtagatatttgagcggtggttagggtaggttttcgtttttgtcgatgtttatgttttgggatatagcgacgatgtagtttagcgaattaattatgatagtagcgggaggattttcgagttcgttcgttatagtagaacgcgcggttaagtttggcgcgaaattgtggtcgtttcgttttttcgtttttatttgtgtaggcgaggtttcgttttttcgtttcggcgtacgtagggtcgcggcgtgttcgcgttcgtagacgtttgggaattgcggtcgcgggttcgcgtttttcgtcgggttttgtcgtcgggttgttatttttgttttgttatgtttcgtcggaagtttgcgtcgggcggtttcgttgtttttagtttagtttttgcgaggtaagcggttttgagtcgatttttttagtttacgggaagtttgaaatttatttttttttttataggtgtagtcgattaggtggattttggcgttgtagcggtcgtagcgtttttagcgttcgttttttcgttttagttgtcgtcgtacgtagtaggttttgtttgggattgggtagggttatcggggttgggggggcggggtttgtgggtaaggcgggcggaggcgtggatttttcgttcgatgatagggttggaggaggaaggggcgggttgaagaaggggaaggtgggaagagtttagtcggggttataaattgggtgaagcgttgaggttttagtattttcgtttgaggagataggtaaaggttatgtaggtttttaatggtaggtttgagataggaatttaggttttttgatttttattttgatgagggggtttgtgggtaaggggtgcgttttttaatttttattttttttttttttttttggtggtcgaagagttttattgattttttaaaaaagtgttggattgggtgattagaagaaagttgtttttaggtttttagtttttaagattgtaatagtatggtttaatatttgaaattattacggttaaaagtagttatattgtgtagttttttagtgaatattttttgtagtttagattataaagtttgaaatatagtttgggtggataaagttttttaggatggtatagatgtgattaattatggagttttttttgttgtcgttttttaacgtaataagtacgtttgtttgtttttaaattagagatattgttataggaaaagtttaagggtgattttttatttgggttatttgtatagtattttttagattgaggttgtggaagggtattgaagattggtgtttagttatttatcgtgttttaatgtaggtggtagtttgggtgttttaaaattttgtttttttcgtatatattttttttttaaaatgattattttttttttgttttttttgaggacgagttacgtttttatgaatttattaaaattttgtatttattatttaaagggtagttggtgaaggatttatgtatgtttttggtaagttttttgttaagaaaaaatttataattttgttatatttttagtgatgaatataaattttttaaataggaaatatttaaattgtaatgaatatgttaaaaatgatattgtttttttattatttatttttttttttttgtgtttttgttatataattgtttattttttagaggtattttatttagtatatgtaagtagggtgatttaagttttataattagagaaagttgaaggtttattgaattaagatcggtagtagttttggttttaattaattttaaatacggtttgagttgttgaggtttttgattattagattttattttgttttttatggtgttaaaaatagtttatttatagggttttttagagttaaaagtagaggattttttgaagagtggatggtaaggaattttgttatttagttgtaaagtttaaattggtttatatacgttaggtttttttagagtagagataatatattattttttaattttttcgatatagg

SEQ ID NO: 50 - DNA, 6565 bp, Artificial Sequence
  chemically treated genomic DNA (Homo sapiens)
  unsure (5909, 5966): n is a or g or c or t
tttatatcgggaaggttagaaaatgatgtgttatttttattttgagaaggtttgacgtatgtgaattaatttaaattttataattgaatgataaggttttttgttatttattttttaaagaattttttatttttagttttggaaaattttatgggtgaattgtttttaatattataaaagataaggtagagtttgatagttaggagttttagtaatttaagtcgtgtttagaattaattgaaattaaggttgttatcggttttgatttaatgagtttttagttttttttaattataaaatttgaattattttatttatatatgttaaataaaatatttttaagaaataaatagttatgtagtaaaggtatagaggggaaaagataggtaataaaagaatagtattatttttgatatgtttattgtaatttaagtgttttttgtttaaaaggtttatgtttattattaaagatgtgataagattatgaatttttttttggtagaaaatttgttaaaagtatatataagttttttattagttattttttaaatggtgggtgtaaaattttggtgaatttatgaaaacgtagttcgtttttaaaaaaaatagaagaggagtaattattttaagggagaaatatatacgaaaggaataagattttgaagtatttaagttgttatttatattaaaatacggtaggtggttaaatattagtttttaatgtttttttatagttttagtttgaaaaatattgtgtaggtgatttaagtgaggggttatttttgggttttttttgtggtagtatttttggtttaaaaataaataaacgtatttattgcgttgaaggacggtaataggaaggattttatgattagttatatttatattattttaagaaattttatttatttaaattgtattttagattttataatttaaattataaaaagtgtttattggggaattgtataatatgattgtttttaatcgtagtgattttaaatattgagttatgttgttgtagttttaaaaattggagatttaagggtagtttttttttagttatttaatttagtatttttttaaaaaattagtaaaatttttcgattattaaggaaaaaaaaaaaggatggaggttaaaagacgtattttttgtttataagtttttttattagaatgggagttaggagatttgagtttttgttttaggtttgttattaaaaatttgtataatttttgtttatttttttaaacggaagtattaaaattttagcgttttatttaatttgtagtttcggttgggttttttttattttttttttttttagttcgttttttttttttttagttttattatcgggcggagggtttacgttttcgttcgttttatttataagtttcgtttttttagtttcgatggttttgtttagttttagatagaatttattacgtgcggcggtagttggggcgggaaggcgggcgttgggggcgttgcggtcgttgtagcgttagggtttatttggtcggttgtatttgtggaggaggaggtggattttaggtttttcgtagattggaagaatcggtttaaaatcgtttgtttcgtaggggttgagttggaggtagcgaggtcgttcgacgtaggttttcggcgagatatggtagggtaaggatggtagttcggcggtagggttcggcgaggagcgcgaattcgcggtcgtagtttttaggcgtttgcgggcgcgagtacgtcgcgattttgcgtgcgtcggggcgggggggcggggtttcgtttgtataaatagggacgagggggcggggcggttataatttcgcgttaaatttgatcgcgcgttttgttgtaacgagcgggttcggaggttttttcgttgttgttatggttggttcgttaaattgtatcgtcgttgtgttttagaatatgggtatcggtaagaacggggatttgttttggttatcgtttaggtatttgtcgggtcggggcgatgggatttaaacgggcgtaggttgtttacggtcggggtatttgggcgggacgcgttaggtcgattttcggcgagaggatggggttagatttgcggtttgcgttggtaggaagggtgggtttcgattggattttttttttttgttgcgcgggaggtttagttgttgatttttgttcggattttgttgttcggtgaggtttttgttttgcggcgttttcgtttagggtaaagttttagttttggagaaaatattttatttttatttatagcgtttcgtttgttaggtgttttagagttcgagtttaagggataatgtttcgagtaacgttgtttttttaatttgtaggaatgaatttagatatttttagagaatgattataatttttttagtagaaggtaatgtgggattaagtagggttttgtttgatgaagtttattagtgtaaatgttagttaaatggaaagtttttcgtgttaatttgggatttttttttttattatggatttgtatgatttgtatgtagtttttaaggtttatttattattattaaaaaatttttgttttagaaattttatgtatgttaacgtacgagtaaattattaggtatggggtagaattggtaattgggtggaggtttcggtggaggttagtatttcgaaaggaaaatagagtaggtttttggaatagttgttggaagagataaggtttgaataagggtagtggagaagagagggtaaaaattttttaaggttatatgattttggattttggagatttggaatttaaaggtgatgtattagggatgaacgtttagatttttagtttgaaagttggcgtgatatgtaaaggagtggagaataatgtattattgtaatgatgaggcgtttttaggatatttaggataattttaggcgtggggatttaggtgaattgaattgttggagggaagggaataattaaggaaaagaatgtgggggttgagagatgtttcgtttaaaatttaagagatttggatatttatggttgtaagaggaggtatggtagaggaaatggaaatagtaagaaaggagtagatgttgtatttttttaatgggatagatataaggtatttgggtttgatatttaggttattggtagagatgatgataagagttcgtagttaaagaattgataaaagttagttttaaaaattttaatatagtttggtaatgttaatgtttttttggtttagatagttgatttttaaagttatttttttaagaaattgaattaaaagtggacgttatatgtaaaaagtttttatagaagtgttataagagtaggatagagatataattaaatatgttttaaggtaattgagtggaatattaagtatttatttttaaaagtatgatttaatattaatttataaagtatataaatataatataattgtattagatagttgtgatagtattgattagaggttgaatattattttaagtttttaatttttataataattttagaagtaggaattattgttatttttattttatagataaagtaaattataaggggttaatacgatttgttttgtggatgataaaatgtatttaatttgagtattttgatttagaatttttttttttttttttttttaagagggagttttgttttgtcgtttaggttggagtgtagtggtgcgatttacgtttattgtaagtttcgtttttcgggtttatattatttttttgttttagttttttgagtagttgggattatagacgtttgttattatatttggttaattttttgtatttttagtagagatggggttttatcgtgttagttaggatggtttcgattttttgatttcgtgatttgtttattttggtttttttagaatttttattatgttatatataattgtaaatgattaaaattaaatattggatataaattggataatgttaaagggaaaaatagttagatttaggtaatgagtgataagtatgaattttggtaagatttttaagtttagttttttaaaggagatttattaaatgttaggatgtttattatatttatgtatatagatagtttttaatgttatttgtgagtttttggaaattgtgattttaagtgaaataatgtagagtaaaattaattttattataggttattggatgtatataagagttaagtttttagggtatattgttggttataaaaatattattaaatttttaaatgaaggttaaaaatatttttaatagaaaatattgaagtaaatatgagttatatatatatttaagaagaataatgtgtatgtttttgggatgtggaaggaaattggaatatttggagaaattttatgtagatatgggaaaagtatgtagattttatatagacggtggttttggttaggaattgattattttttttattaacgttagaagaaaacgatgttatttaaggatatgttgtatataatatatgaaaatatatgtatatttttaaaatatatttaggttttttttgtgattttataggtaatagaatttggtgattatgggtaagaagatttgggttttttatttttgagaagaatcgatttttaaagggtagaattaatttagtttttagtagagaatttaagtaagtattttaatataaatttattataagaaaattatgttttatagtggagattagtatatgataaaatgaaattgtataaaaggagttattgatgaagttgtttaatattataaaggtgattatagaaaattaataagtagttatttatattatatgataataatttattttattatttgagtaattgattttattattttgaaaagttatattaaatattaaatagtttattgtggtattagatttgtaagttattttgaattattatttagtaggtttaaatataaattatatagtgtaattaataatttgtagttttatataaagttaaaataattattttttgggatttgttaaaattaagtgatgattttttttttggatttaattttaaatgtaataaaatgtgaattttaggatgggttgaaatgggttataattttttattttgttatttttagttaattataatatttaataatattttgtatttaatatttattatttagtgtttgaaggtaaaatattttaaagtattgaaatggttttagagattttggagagaagcgggtatttttagttagtttttgttaagaatttttttgttttttaatttaggggttggagttagtagtttatgaagtttgatatgttttggtgattggagagtgggaggggtaattatattaagattgtttaggaagttaattttaatggtttgggaggttgaggggtggttagaattggatttgtgttaatttatttttatgtttttataaagaattgtttaagattgggtaatttgtataggaaagaggtttaattgatttatagttttttatggttggggaggttataggaaatttaaaattatggtggaaggggaagtaaacgtatttttttttatatggtggtaggaaggaaagtgttcgcgtcgtttttttttaattttattcgttttttattttatttattaatttttaacgttttttcgaggtaattagggggtttaatttagttattcgcgtcgcgtttttatcgattttttttttatttttaataataagttttcgttaggacgtattatatgtttaaagtttttatagtttttagtttagtaagggtagagtacgtattttagaaatttataaatagatgattatgattatttaatatagtagtaaggttatgtagataatattggaattgagagtgaaaagtagatttagaaggatggaagtgtggtggagatttatgtataatttnttatagagagtaaagtaaggttaagtaattttattatttggaagttttttttaaatntaatagatttttaaagagttagtttgagttttgagaaagaaaaaagtaagaattttttttttaaatagggttggtttgattgtataaaagttattttattataaagattaaatttaggttttgatgttggtattttagtgtgaggaaagaaagatttttggttggaagtagtagtaaaggttattaaatgagagagtgtatgggtgggaatatttagttaattgggtttgaatatatagaagatggtggtgagagggaaaatttttttttgattagttttaggtttggataatgggattatttatagtagttgttgggtatttttttaaggtggagaatttaatagttttttattgaagttaaaagatatatcgattttcgtgggtaggtgttgtaagttataagtttaggaatttgggggttatggttaagttttttaaggtatttttatttgtattttattttaggtaattgtgggtgttacgtggttaaatattgtaggggatgggggttggagtaaagtagggcgatgtttgggaagtgtaaaaacgaatttttggttagtgttaagggagttggtttggttttaggtgaaagag

SEQ ID NO: 51 - DNA, 11787 bp, Artificial Sequence
  chemically treated genomic DNA (Homo sapiens)
tgtgaaatattagttatgaagaaattttgataataatattttagtgtagaattgtatattagtaatagtatgtttggatttttttagatatgtggtattaatatatgtttggaattttaagtgttagattaagaagaaaaatttaagatataaagtggtgttttaataatttgagttttattatttttaatgttaagaaattattatatatataaattttatgtttgtaattttagatttattgttgtataggatttttggtaattataagttagttgtattaagtaaattttgatttatttggttggtggttttgtgaacgataattatttttaggcgggtttaatggaaggtcggagaaggtattgtttgataagttatattttgttagttttagaattttgagtgaatgttgttgttttgttttgtttgtttttatattgtaaattggttatgagtttatttattatttttttttgttgtgaatttttagtaatatattttattaaaagattttttttgataaagtagatttttatgagttgaaatatttattgattttaatgtttatttttagatagttttgtataggaatttttatgtttaaggatagttgattttggtaaattggattttttaaaaattagattatagaatttttgtttgtaatttttttatttaaggaatatttagataatttggtttggagagaagattattaaatttttttttatataataggttttttttattaggtttgtaagggataaatagtgaatatttatttgtaattatgtaattgttttgtagagtaagtgtagttataagtggtaagaaatgaatgagtatggttgtgttttaattataattattatggatggatatatttgtattttttatgttagatggaattttgttttgttgtttaggttggagtgtagtgacgttattttgatttattgtaattttcgttttttaggtttaagtagttttgttttagttttttaagtagttgggattataggcgtacggttaatttttgtatttttattagagacggggttttattatattggttaggttggttttaaatttttgatttcgtgatttgtttgtattaattttttaaagtgttgggattgtaggcgtgagttatcgtgtttgatttaggattatatttaaatgatttataaatgtaaaaattatttttatattatagatttgatttaaggattgtagtttgttgtgtttttgttttttgaatgggacgtggtggtatagtagttgggattatagttatatattattacgtttatttaattttgtatttttagtagagatggggtattattatgtttattaggttgattttgaatttttgattttaggtgatttattcgttttaattttttaaagtgttgggattataggcgtgagttattgtgttcggtttgtatttttatttttaaattttagtatttttgaataataacgggtagagaaatattcgtagtagttgtttataatagagtgaaataaaaagtttgaggaattgttaatagaaaaatgggtggtcgtggggagtatcgggatttgtatttgtatataatttagggtagtttttaatgagtttatgagttatttagggattttattaaaatgagattagttttgagtggggttttttttatagatttttgttattatattttgaagagtaagggtttagttgattttaagtaggtgtgtatttttttggatagtgtttgtagaaaaatagaattatatttatggattttatgattatattgttagttttttggttaaggggttgagttaggtatttattgtagatagaaataaagtagatgtatgtttattagtgagtattgagatatttagtatggttatttatgaattgaagtttggtttttttttatttattaattgattattttttattttaagtaagtattttatattttgtatattagtatatttttggatttcgtttttttatatggtttgatattttgaatattagattatttaagagtgagatttaatttatttttaaattgtttttaaaattagggaaataaaagagaatgaaattgtggtaattttttttttttttagttattagatgtatgttatttatggtgggttttggtttttttaaagataattggaagattttattggattgatagagagaaattgcgtaattttattttagtatgttaagatgaagaaacggggggatttgtagataggttaggagatatggtaagtaatatttttgatatatttttataaattattttagcgtttgtattattttatggttttatggatttttagggtggtatttcgagtgttgttttgaaagtagtttttttttttatttattgtagagtgtatgaaggatatagaataattttatagaaattttttgtcgtttgttgttaataaaattagtatatggtaaaggttaggtatttataatttgaagttaaagaagtttttattttgtgatttgtatataaatttttttttaaataggtggattttttttatattttatttggaattgttggattgttatttttgggagaagaatagattaaatttgttaattttgttttttgtatgtttgaagaagtgttttagagagtgaatgtttagtttgagttagtgagttagatttattgaattgaaagttgtatagtatagttttgttattttaatatttttgtatttgaagtgtttatcgaatttaaaagtgattattgttaatattttgtatattgtgttaaattaattttaataaattatataattatatatattgtaaaataaagatcggtattttattttttgttttttattttgaagttttgttattttgattatagttttttgtgtatatttttgtgtttgttatgtttaataattgagttaatataaaataattttaggtttttatttgattttttttttatgtatattttttatttgttttatagtaagttgatgtaaattggtttgttaataagaatgttaattgatgaaagtggatagaatttatatatgaattaaatgatgtataaaataaatggttgttgaaatttggaaatgattgataggtttgaatatggttattttgaattggttatagatttaggttaaatggtaatttattattttaaaatggggttgtgattcggattgttttttttttttttttttttttttttttttttagtattttatatattagaattatttaaagaaggagttgtttttaaataaggaaatattaacgggtaagttgatggttattatagtatttttttgtatttgttttttttttaaaaagttaaaatgggtataattatttttttttatttttttgtgatagaatttttgttgtttaggttggagcgtagtagtacgattttagtttaattgtaattttcgtttgtcgggtttaagtaatttagtcgtagtttttcgagtagttgggattatagtcgtatattattatgttcggttaatttttatgttattttagtatagatagggttttattatgttgaggagttggagattagtttgattttgtgatttatttatttcggttttttaaagtgttgggattataggcgtgagttattacgtttggtttaaaatgagtataattattttaggggtttatagttttggtgaaagtgaggtattttttatttttaaattttattttttagagatagggttttttttttttttttaggttggggtatagtagtgtaattatagtttattgtaattttaaatttttgggtttaagtagtttttttattttagttttttgagtattagggtttataggtatttgttattatgtttattatgtttagttgattttttaattttggggataggtattgttttttttaggttggttttcggaggtgaagtaattttttggttttagttttttaaagtattgggattatagggaggagttatcgtgttcgatttgaaaataaggttttttgatggaaattgagattttttttaagtatgtttggaatgttttgtgtaataattattttaagaatagagatgtttttaaggattgttgttattgtatgtgggtaaatcgttgtgtataattggtttattgagatatttaatagtggtaggattttagtagtggtgtaaattaatgttttttaatagtttttgtatggtagtatttagataatttcgttatgtttaatttatggatttttggtaagttggtattattggttttatttaaggaattttttaaaggttattattgtaaagttggagtttgaatttttagtgtgttattaattgatttatatgttagaaattatagtattagaaattggtagatggggaattgttaattgagagattttatttagttagtttttttttgttttttattttattatgtatatagttatgtgtatattattttttgataatataattattttttttatatttggttataagattaattttaggtgggttatgttgtgtgagtattatacgtttttattgtgttaaaggtattgggtgtattgtgttgggtggtttttatatttaaagataagttagtgtgtttggacgtgtgggaaatgtatgtaatatttgtaataagggagattgggtgttgtgagaataatggggttaataaatcgggtggttattgatgggttttgtagagttttggttagtttgatatttgtaggttgaggatgttttagtgaggtttatgtggaaagtgatgggtttgggaatggttggaagtagggttatagatttgaagtacgtgaatttatgtggaaagttgagtttgtttgcgtttgcgtagtgtagtttagtgcgtcggcgcgtagttttttcgttcgttttagcggcgtagtttttgtagttgggttattggaggggtcgtttagaaattttatatttttcgggttagggaaggtttgggaggatgttgaggtttgagattttattaatttcgttttttgtttcggcggttttttcgtcgtcgggagaaattcgtttattttagggttttcgttataatttcggattttaggagattttatagagtcgtttttcggtttaggtggtttttgtatttatttgttttggtacgttaggagttgcgggcgatcggagtagtagtagtagtagttttttttgtttcgcgttaaattttcggttagtttaaggtaaggagtgattgggtggaggagtttttttgaggttagaggtcggtagtttatggaggttcgggggtacgtgggtggtggttattatagtgaagttgtgatttggttggggcgtgagatttgagtgttttgggaatttggtgagtttgggtgattagaagttttgattttttaaattggttttattgtaagattttgattgtggatggtttagttttgagaaaggttgaagtattttatataacgttttttatagtgtttgataaatgatagtttgtgcgtgagtttgttgatagaagttgtgagttgatttttggttgttgaatttaattttttaaattttgttaaggtgggataaaatagattaaattgaatattttatttaatttagggaaaataatatgtttagtattaaaagagtgggttgggcggtggttgacgtttgtaattttagtattttgggaaattagggtgggcggattatttgaggtcgggagttttatattagtttggttaatatggtgaattttttatttttattttttatttttattaaaagtataaaaattatttgggtgtggtggtacgtgattgtggttttagttatttaggaggttgaggtgggaggatggcgagttcgggaggtcgaggttgtcgtgagttgagattgcgttattgtattttagtttgggtgatatagtgagattttgatttaaaataaataaataaaaaagatgtatgttttttaaattatttattattttgttagtttttatttatgataaagtattattattttttatatacgattgtaatataatggtaaagtaataaatattaaatttaatggttattttttagtttattttatgtgatttttttgttgtatttaatgtttttaatttttttatttttagaaatagagtttcgttatgttgtttatgttggttttaaatttttggttttaagtgtttttgtttcggtttgtttaagtattgggattataggtatgagttattgttgtttggtttatgtttaatgtttttgattggtttttttttaaatttttttaatttggtttttttgattttatttgtttttgtttttttgttattttttagagaattgttgtgtttatttttgtttttaaattatgggtatgttattaaagtttttttttttaggttatttttatttagatgtgattatttttatagtttagattttatttatattttagatttattttagattgttttttgaagtttttattgatggattaatggatattttaggttgattatatgattaattaaatttttttttgtattttttttttttttttgagatagagttttgttttgttgtttaggttggagtgtagtggtatggttatgatttattgtagttttaaatttttgggtttaagcgatttttttattttagtttttcgagtagttgggattaaggtatgtgtttttatagatggttaatttaaaaaatttttttgtagagatagtgtttttttacgttgtttagtttggtttcgaatttttaggtttaagcgatttttttattttagttttttaaaatgttgggattataggtgtgagttattgtatttagtttttaaatttttaagtgtttttttatttttgtagtttatttattgtattattagagttatgtggaaaatgattttattatgttttttgttatttaaattagtagatttgtatttgtaggtaaaagattaaattttttagaaggatagttaaagtaattgggatcggtttttaatttttatagatttattttttattatttaatatttattttgttttttaataaaattgagttatttgtaatttttttaaagtaatatgaatgtttatattgttagtttaatttttttttttattagatgtttggttatttatttatttattagtaatgataatatttattaatttatatgtatttattttgttttggttttttattaggtagacggtatttttgatttttataataattttgtagagtagattttttttttgtttttgttttatagatagaattaaggtttaaataggcgaataaaggtttaaattatgttagtagttggggataataatttgtgtttttaatgaatttaaggtttagtagagaagatagatttaaaaattaataaatatatatttaagaaataattgtatttgaggtatttataatttttgaggtaggtataattaaagtatggggataaaagtgggaaaagatattttatagagtaagtgtattttgaattggtttttaagaataagtaggaagaagaatgttagttaaagggaaatagttggagcgtatttttgagaaaaatacgtgtaaaggtatagaagaattatgtaaaattgttaataattttgtttggttagagtaggagagtgatttaggtagataaatttgaatgtagatatagttgtgagaattagatttgggagataaatttaatttagagattttttatatttaatattaggtttttggttttggtgattggatagatggtagtagtattttttgattttgggaattttgtaggtaaagtaaattttagagggaagatgatgagttttgttatggatatgttgagtgtgaaaagtttgtgggatatttatatatttatattaagataattgaatataggaaattagagttaagaagagagaaatttgagggaaatatggatttgaaagttattagtatgttgggattatagtagagaatatgaagattatatagtaaaatagaggttaaggaagtaggaggagaattaagataagtgaatgagttttaagaaagggtatatagtttaaaagtagtttgagaataagaaatagttttttttatttttagttttcgtatttttagtttttggtaattatttttttttttagttttttaaagtttagaaatgttaatggagtatattttatgttggttttatatacgtttttatgatagtatttttatattttgtttatatttttgtaaatattttttttattaaattattttagtttgagtatattattgatttttgttggaatttatataatgaagttatattttattttatggtgagtatggggagatatataggaattgtaagaaagagagatattgattagatttgttttttagaaagattattggtgatgattcgaagaatagattagagaggtgtaatattggaagtaaggagaagaagaagtaggaaatttgtataaggattaaagaagatataggtttaaaatgggttgggaggagtagagagggatttaaattttagtgatgttaaaaaaaaagaattttagtatttagttattgagtgttagggttgatgaaggaagaattgagaatgttttttaagtttatgatttgagtgataagggataagttggtataattaattatattggtaataaagaattaattttgagggaaagatagagtttatttttggatatttagaatgttgggaagatatttaaaggtttatgtttaagagatagatatagtgatttggagttatattgtttgatagaatattttgtgataatagaaacgttttatatttatgttgttcgatgtggtaattagtagtcgtatgtggtttttgagtatttgaaaatgttgttagtgtgattgaggaatagaatttaaattgtatttaattttgatttagttaaatatttatatatgttgttttattgaataatgtaggtatagagttgagaacggtttttgtatttttgaaggattaaagaattaagaatattttgtgatattaaaattatatgaaatttagaatttaatatgtagaaataaagttatttttaattgaaatatagttatttttatttatttatgtattatttatgattgtttttttatgatagtgttagagttgagtaattgtgatagtgattatatggtttataaaagtttaaaatatttgttatttggttttttatttaaaagtttatgggttgggtatgatggtttatgtttataattttagtattttgggaggttgaggtgggtagattatttgaggttaggagtttatgattagtttggttaatatgataaaattttgtttttattaaaaatataaaaaaaaaatagttaggtgtggtgggtatgtttataatgttagttgtttgggaggttgaggtaggaggattgtttgaatttgggaggtagaggttgtagtgagttgagattgcgttattgtattttagtttgggtaataagagtgaaattttattttaaaaaaaaaaaaaaaaagtttatgttgaggtatggtggtttatgtttgtaattttagtgttttgggaggttgaagtgggaggattgtttgaggttaggtgtttgagattagtttgggtaatgtagtaagattttgtttttataaaaaaaaaattagttgtgtgtggtgaggtgtatttatagtttatagttatttaagaggttgaagtaggaggttatttgagtttatgagtttgaggttgtagtgagttgtgattatattattgtattttagtttgggcgataaagagagattttgtttttataagatagtaaaatagattgggtatggtggttttcgattataattttagtattttgggaggttgagatgggaagattatttgagtttaggagtttgagattagtttgggtaatatggtaaaattttatttttataaaaatataaaaaattagtttggtatggtggtatgagtttatagttttagttattcgggagggtgaggtaggaggattgtttgagtttaggagtttaaggttgtatttagttaagattatattattgaattttagtttaagttatagaacgagagttttatatatagataaaaaggaaaaattaaaagtttagtaatttttggtttatagtttaaggagtcgttatagttatatacgaaggtttgagagttgttagaaaatagatgttaatagaaataaagaggagagatgagatgtttggagatgtataatgttgatttgtgagggaaagtttaaaagtatgaagttttggaggttaatagttaagaagtagaggaaaaaggagatggtaaaggaaattaaaagtggtttaaagagaatttaagatagagagttgtggaaattaaagagaataggtgaatagagtttaaatattttaaaatttttttagaatttttatgtgttaagaggttatgttaggttgtttatgtatattatttaaaaattttatgataattttgtaaaataggtaatagtttatattagtagataagtatttaaataaggaattgaagttaattgagtttaaaatgttatttgtataggggagagaaatttaatgaagaaattaatagaagaaggttaaaagaggtttaataattattatataaatgaaatatatgttttagtttgtattttgttgtttttaaaagaatatttgaaattgggtgattattaagaaagaaaatatattttttggaagtttggaggttgggaagtttaaggttaaaggaggtatatttagtgagggtttttgtgttggtggagtttttgtagagttttgtagtggtatagggtattatatggagagggagttgagtatggtagtttaggttttttattttttttttataaaattattagttttattttcgtgataatttattaatttattaaattatgaatggattaatttatttatgaaggtagagtttttatgttttattattttttaaaggttttatttttgttttgttatattttattggggattaaattttaatgtaagttttagaggggatagatatttatattttagtaatatatttggtatatttgaagattaaagggtaatttatgattttagttagagtagttgtagtgaatttgtagaggtaaaagttatattagtatatttttgtatatttattaataatgttattaattttgttataatttgtttatttttaaaaattatttttatatgaaattttatagaaagtgaatatagtggttgggtgcggtgatttaggtttttaattttagtattttgggaggtcgaggtaggtagattatgaggttaggaattcgagattagtttagttaatatggtgaaattttatttttattaaaaatataaaaatttattaggcgtggtggcgggtgtttgtaattttagttattcgggaggttgaggtaggaggattatttgaatttgggaggtggacgttgtagtgagtcgagattatgttattacgttttagtttgggcgataagagtaagattttgttttaaaaaagaaaaaaagaaaaaaaaggaaagtgaatatggtataaattataatgattaatatattattgtataatttaaatttttaagaattgattgttaattttttaaatttagg

SEQ ID NO: 52 - DNA, 11787 bp, Artificial Sequence
  chemically treated genomic DNA (Homo sapiens)
tttaaatttgaaaaattaatagttaatttttaaagatttgaattatgtaatgatgtattagttattataatttatattatgtttatttttttttttttttttttttttttttttgagatagagttttgtttttgtcgtttaggttggagcgtagtggtatgatttcggtttattgtaacgtttattttttaagtttaagtgatttttttgttttagtttttcgagtagttgggattataggtattcgttattacgtttggtgaatttttgtatttttagtagagatggggttttattatgttggttgggttggtttcgaatttttgattttatgatttgtttgtttcggttttttaaagtgttgggattagaggtttgagttatcgtatttaattattatgtttattttttataaaattttatgtgaaaatgatttttgaaaataaatagattataataaaattaatgatattattgataaatatataaaaatatgttaatatagtttttgtttttataagtttattgtaattattttggttaaaattataaattattttttaatttttaaatatattagatgtgttgttaaggtatgaatatttgttttttttgaaatttatattgaaatttaatttttagtgaagtgtggtaggatagaggtggggtttttaagaggtgatggggtatgagggttttgtttttatgaatgaattaatttatttatgatttaataggttaatgggttattacgagagtaggattggtggttttataagaagaggatgagagatttgagttattatgtttagttttttttttatgtgatgttttgtattattataggattttatagagattttattagtataaagatttttattaaatgtgttttttttgattttggattttttagtttttagatttttaagaaatatgtttttttttttgataattatttagttttaagtatttttttaaaagtaatagaatatagattaagatatatgttttatttgtataataattattagattttttttaatttttttttgttaatttttttattgaattttttttttttatgtaaatggtattttagatttaattggttttagttttttatttaggtatttatttattgatgtaagttattatttattttataggattgttataaaatttttaaataatgtatataaataatttagtatagttttttggtatatagaagttttaaaaaaattttaaaatgtttgggttttgtttatttattttttttgatttttataattttttattttgaattttttttaaattatttttagttttttttgttatttttttttttttttgttttttaattgttggtttttagggttttatatttttaagtttttttttataaattaatattatgtatttttaggtattttattttttttttttgtttttattaatatttattttttgataatttttaagttttcgtatatagttgtaacgattttttaaattgtaaattaggggttgttaaatttttaattttttttttttgtttgtatgtgagattttcgttttgtagtttaggttggaatttagtggtgtgattttggttaaatgtagttttgaatttttgggtttaagtaatttttttattttattttttcgagtagttgggattataggtttatgttattatgttaggttaattttttgtatttttgtagagatggggttttgttatgttgtttaggttggttttaaatttttgggtttaagtgatttttttattttagttttttaaaatgttgggattataatcgggagttattatgtttagtttattttattgttttataaagataaggtttttttttgtcgtttagattggagtgtagtagtgtgattatagtttattgtagttttaagtttatgggtttaagtaattttttgttttagttttttgagtaattatggattataggtgtattttattatatatagttaattttttttttatagagatagggttttgttatattgtttaggttgattttaaatatttggttttaagtaatttttttattttagttttttaaagtattgagattataagtataagttattatgttttagtataaattttttttttttttttttgagatggagttttatttttgttgtttaggttagagtgtaatggcgtaattttagtttattgtagtttttgttttttaggtttaagtaatttttttgttttagttttttaagtagttggtattataggtatgtttattatatttggttattttttttttgtatttttaatagagatagggttttgttatgttggttagattggttatgaatttttggttttaggtgatttgtttattttagttttttaaagtgttgggattataggtatgagttattatgtttagtttataaatttttaaataaaggattagatggtaaatattttaggtttttgtgggttatataattattgttataattatttagttttgatattattatagaaaagtagttatagataatatataaataaatgagaatggttatgttttaattaaaaatggttttatttttatatattgaattttaaattttatataattttaatattataaaatatttttgattttttaattttttaaaagtgtaaaaatcgtttttagttttatatttgtattgtttaataaagtagtatatgtgagtatttaattaaattaaaattaaatataatttaaattttgttttttagttatattagtaatatttttaaatgtttaaaagttatatacggttattagttattatatcggatagtataagtatgaaacgtttttattattatagaatattttattagataatgtagttttaggttattatatttattttttgggtataaatttttaggtatttttttagtattttaaatgtttaaaagtgaattttattttttttttaaaattaattttttattattagtatggttaattgtattagtttgttttttgttatttaagttataagtttaggagatatttttaattttttttttattaattttaatatttagtgattgagtgttagaattttttttttttaatattattaaaatttaaatttttttttattttttttagtttattttaagtttgtattttttttggtttttgtgtaagttttttatttttttttttttttgtttttagtattatatttttttaatttatttttcgaattattattaataatttttttgaaaagtaaatttgattagtattttttttttttataatttttatgtgtttttttatatttattatagggtaaaatataattttattatatgggttttagtaggaattaatgatatatttaaattgggataatttgataaagagaatatttataaaggtgtggatagggtgtaggggtgttattataaagacgtgtgtagaattagtataaaatgtgttttattagtatttttaggttttagggagttaaggaagagagtggttgttagaaattggagatgcggaaattggagatggagagggttgttttttgtttttagattatttttagattatatatttttttttgaaatttatttatttgttttaattttttttttatttttttgatttttattttgttatatagtttttatattttttgttgtggttttaatatattggtaatttttaaatttatattttttttaagtttttttttttttagttttagttttttatatttaattattttaatataaatatatggatattttataggttttttatatttagtatgtttataatagagtttattattttttttttaaaatttgttttgtttataaaatttttagaattagaaaatattattattatttatttagttattaaaattagagatttggtgttgaatatggggggtttttgggttaaatttgttttttagatttaatttttataattatatttatatttaagtttatttatttagattatttttttgttttagttaagtaaaattattagtagttttatatgatttttttgtgtttttgtacgtgttttttttaagaatgcgttttagttgtttttttttggttggtatttttttttttatttatttttgaagattagtttaaggtgtatttattttgtgaaatgtttttttttatttttgtttttatattttaattatatttattttaaaaattataaatattttaaatatagttattttttaaatgtgtatttgttgatttttaagtttgttttttttattgaattttaagtttattgagagtatagattattatttttagttgttaatataatttgaatttttgttcgtttatttgggttttggttttatttgtaaaataggaataaaaaaaaaatttattttgtaaaattattgtgaggattaaagatatcgtttgtttagtaagaagttagaataaagtaggtgtatataaattagtgaatgttattattattgataaataagtgggtgattaagtatttgatgaagagagggattagattgataatgtgaatatttatgttgttttaaaggaattgtaagtagtttagttttgttagaaagtagggtaaatattaaatgatgagggataaatttgtaaagattagaaatcgattttaattgttttggttatttttttagagagtttgattttttatttgtagatataggtttattgatttaagtggtaagggatatgataagattattttttatataattttggtggtatagtaagtaagttataaggatggaagaatatttaagagtttgagggttaggtgtagtggtttatatttgtaattttagtattttgggaggttgaggtaggaggatcgtttgagtttagaagttcgagattaggttgggtaacgtaggaaaatattgtttttataaaaaaattttttaaattagttatttgtaggggtatatgttttggttttagttattcgggaggttgaggtgggaggatcgtttgagtttaggaatttgaggttgtagtgagttatgattatgttattgtattttagtttgggtaatagagtaagattttgttttaaaaaaaaaaaaaaagtgtagagaggaatttaattaattatatagttagtttgaggtatttattagtttattaataaaaattttagaagatagtttgaagtaagtttggagtgtagatgagatttgagttgtggagatagttatatttaggtagaagtggtttaggaaaaaaagttttaatgatatgtttataatttgggaataaaggtgggtatagtaattttttgggaggtagtagaaaaataggggtaagtggaattaaggaagttaaattaaaagagtttaagagaagattagttaagaatattaaatataggttaggtagtagtggtttatgtttgtaattttaatgtttgggtagatcgaggtaggagtatttgagattaggagtttgagattagtatgggtagtatagcgagattttgtttttaaaaataaagaaattaagaatattaaatatagtagaaaggttatatgagatgaattgaaaaatgattattggatttggtatttgttattttattattgtgttgtaatcgtgtgtgaaaaatggtgatgttttgttatgaatagagattaataaaataataaatgatttgaaggatatgtattttttttgtttgtttgttttgagttagggttttattgtgttatttaggttgaaatgtagtggcgtaattttagtttacggtagtttcgatttttcggattcgttatttttttattttaattttttgagtagttgggattatagttacgtgttattatatttagataatttttgtatttttagtagagataggggatgggggtgggaggtttattatgttggttaggttggtgtggaattttcggttttaagtgattcgtttattttggttttttaaagtgttgggattataggcgttagttatcgtttagtttatttttttaatattaaatatattattttttttgaattagatgaaatgtttaatttaatttattttattttattttagtaggatttggagaattaaatttagtagttaaagattagtttataatttttattagtaaatttacgtataaattgttatttgttagatattgtgagggacgttatatgggatattttagttttttttagaattgagttatttatagttaaggttttgtaatagaattaatttgaaaagttaaggtttttaattatttagatttattaaatttttagggtatttagattttacgttttaattaaattataattttattgtggtaattattatttacgtgttttcgagtttttatgaattgtcggtttttagttttaaggagatttttttatttaattattttttgttttgagttggtcgggagtttggcgcggggtagggaaggttgttgttgttgttgtttcggtcgttcgtagtttttgacgtgttaggataggtggatgtagagattatttggatcgaagggcggttttgtggagttttttggagttcgaaattgtagcggggattttgaggtgagcgggtttttttcgacgacggggaaatcgtcggggtagaaggcgaggttgatgagattttaggttttagtatttttttaaattttttttgattcgagaagtatgaggtttttgagcgatttttttagtagtttaattatagaagttgcgtcgttgaaacgggcgggagaattgcgcgtcgacgtattaagttgtattgcgtaggcgtaggtaggtttagttttttatatggatttacgtattttaggtttatgattttgtttttagttatttttaaatttattattttttatatgaattttattggaatatttttagtttgtaggtattagattgattagaattttgtaaggtttattaatgattattcgatttgttagttttattatttttatagtatttaattttttttattgtaaatgttatatgtattttttatacgtttaagtatattagtttatttttaaatgtagaaattatttaatatagtatatttagtgtttttgatataatgagaacgtgtaatgtttatatagtataatttatttaaggttgattttgtgattaaatataggaaagatagttatattattaaaagatagtatgtatatggttgtgtgtatagtagagtaggaaatagggaaagattgattgggtaagattttttagttaataattttttatttattaatttttagtattgtggtttttaatatataaattagttaatggtatattagaagtttaaattttagttttgtagtggtgatttttagaaaattttttaaataaggttaatagtattaatttattagagatttatggattaaatatgacgaaattatttggatattgttatatagaagttattagaagatattaatttatattattattgaaattttgttattgttgagtattttaataaattagttatgtatagcggtttatttatatgtagtgataatagtttttaagaatatttttgtttttggaatgattattgtatagggtattttaaatatatttgagaaaaattttaatttttattaaaaaattttatttttagatcgggtacgatggtttttttttgtaattttagtattttgggagattgaggttagaggattattttattttcggagattagtttggggaagatagtgtttgtttttaaaattaagaaattagttgggtatagtgggtatggtggtaggtatttgtagattttggtatttaggaggttgaggtggaaggattgtttgagtttaggagtttaaggttatagtgagttgtgattgtattattatgttttagtttggggaagaaaggaagattttgtttttaaaaaataaaatttaaaaatagagaatattttatttttattaaaattgtaaatttttagagtgattgtatttattttaggttaggcgtggtggtttacgtttgtaattttagtattttgggaggtcgaggtgggtggattataaggttaggttggtttttagttttttagtatggtgaaattttgtttgtattaaagtaatataaaaattagtcgggtatggtggtgtgcggttgtagttttagttattcgagaggttgcggttgaattgtttaaattcggtagacggaggttgtagttaagttgagatcgtgttgttgcgttttagtttgggtaatagagattttgttataaaaaaataaaaaagagtgattgtatttattttagttttttaagaaaaagataggtgtaaaaaaatattgtggtgattattaatttattcgttagtgtttttttatttgaagataattttttttttgggtaattttgatatataaaatgttaaaaaaaaaaaaaaaaaaaaaaaaaaaaaggatagttcgaattataattttattttaagatggtagattgttatttaatttaagtttgtgattaatttagaataattatatttaaatttattaattatttttaaattttaatagttatttattttgtgtattatttaatttatgtatgggttttatttatttttattagttaatatttttgttgataaattaatttatattaatttgttatagaatagatgaaaggtatatatgggggaaaaattaagtagaaatttagagttattttatgttagtttagttattgaatataatagatatagaagtatatataaagaattgtagttagaataataggattttagaataaaaagtagaaaataaaatatcggtttttattttataatatgtataattatataatttattaaaattaatttaatataatatataaaatattaatagtagttatttttagattcgataagtattttaaatatagaaatgttaaaatggtaaaattatattatgtaatttttaatttaatgaatttagtttattagtttaggttgaatatttattttttgaagtatttttttaggtatgtaaaagataggattaataggtttaatttgttttttttttaaaagtgataatttagtaattttaaataaggtatgaaaaggatttatttatttaaaaaagaatttatatatagattataaaatgaaaatttttttaattttaaattatgaatatttgatttttattatatattaattttgttagtaataagcgataagaaatttttgtaagattgttttatattttttatatattttataataaatagaaaaaaaaattgtttttaaagtaatattcggaatgttattttggaaatttatggaattatgaagtaatgtaaacgttgaaataatttatagaaatatgttagaaatattatttgttatattttttggtttgtttgtaaattttttcgtttttttattttgatatgttaaaatgaaattacgtagtttttttttattaatttaatgaagttttttaattatttttagggaagttaggatttattatgagtagtatatatttggtaattaggagggaaaaaagttgttataattttatttttttttatttttttaattttgagaataatttaaaagtgggttaagttttatttttaggtaatttgatgtttaaagtgttaaattatgtggaaggacgaaatttagggatatattgatatgtagggtatgaaatatttgtttagaatgaaagataattaattaatgggtaagaagagattaaattttaatttataggtaattatgttaaatattttagtatttattgataagtatgtatttgttttgtttttatttgtaatgaatgtttaatttagttttttaattaagaagttagtagtataattatgaaatttatgggtatagttttgtttttttataagtattgtttaggggggtatatatttgtttaaaattaattaaatttttgttttttaaaatatggtgatagaagtttataaagaaaattttatttaaggttgattttattttaatgagatttttgagtaatttatagatttattagaagttgttttagattgtgtgtaagtgtaggtttcggtgttttttacggttatttatttttttgttgatagttttttaggttttttattttattttattgtagatagttattgcgggtgtttttttattcgttgttatttagaaatattaaggtttaaaaataaaaatataggtcgagtatagtggtttacgtttgtaattttagtattttgggaggttgaggcgggtagattatttgaggttaggagtttaagattagtttgatgaatatggtgatattttatttttattaaaaatataaaattggatgggcgtggtggtgtatgattgtaattttagttattgtattattacgttttatttagagggtaggggtatagtaagttataatttttgagttaaatttatagtgtaggaatagtttttatatttataaattatttaaatatagttttgggttaggtacggtggtttacgtttataattttagtattttgggaggttgatgtaggtagattacgaggttaggagtttgagattagtttggttaatatggtgaaatttcgtttttaataaaaatataaaaattagtcgtgcgtttgtagttttagttatttgggaggttgaggtagaattgtttgaatttgggaggcggaggttgtagtgaattaagatggcgttattgtattttagtttgggtaatagagtaagattttatttgatataggaaatataagtatatttatttataataattgtaattggaatatagttatatttatttattttttattatttatggttgtatttgttttataggataattatatagttgtaaatgagtatttattatttgttttttatagatttgataagagagatttattatgtggaggaaaatttaataattttttttttaaattaaattatttgggtattttttaaataagaagattgtaaataaaaattttgtagtttaatttttaaaaaatttaatttgttaaaattaattgtttttaaatatggagatttttgtataagattgtttggaaatggatattaggattaatgagtattttaatttatgggggtttattttgttaaggggagttttttagtaggatatattattgaaaatttataatagggaaaggtaataaataagtttatggttaatttataatatagaaataggtaagataaagtagtagtatttatttaaggttttaaagttagtagaatatggtttattaaataatatttttttcggttttttattgagttcgtttgagggtaattgtcgtttataaagttattagttaagtaaattagaatttatttgatgtaattgatttgtaattgttagaaattttgtgtaataatagatttaaaattatagatataaagtttatgtgtataataattttttgatattaaaagtgataaaatttaaattattaaaatattattttatattttaagtttttttttttgatttgatatttaaaattttaaatatgtattaatattatatatttgaaaaaatttaagtatattattattagtatgtaattttgtattgaaatattattgttaaaatttttttatggttagtattttata

SEQ ID NO: 53 - DNA, 5455 bp, Artificial Sequence
  chemically treated genomic DNA (Homo sapiens)
tttgcggtatagttttatttacgagtaaaaatagtttcggaggcgaatgtgagagtgaggtggggattatatttaagggggcggatttaagtaggtttcgatttttttgggtttagggagagggaatggttgttcgagaaatttaagtagaagggagagggagatataggtagagatatataaagatgagagaaataaaaggggggaaggggaaagaaaggcggtaggaaagtggagagtggggagacgtgcgtgttaacggagagatataaacggagcggggagaagaggatattgttaaggaagggagggaggggtatagttaggaggttttaagattgggaaatgaatgtagtagcggtagggaggggagcggtcgttgtaattagaggggggttgggtgatatcgagaagtttgttgtttgtagttttgttatttaaatgttataggattatttttttttatttatattcgtagagagaggagagagttggggtaagttttttatttttttaatttttaaattttaaaatgttttaatcgagtttttttttttcgtttgattttttttttatttatttttgtggtagttacgttaaatttacgtttttttgttatttttttttttgtttttttttttagttttggggatatttaatgttattcgattatttttttagttttgttttttaaatttcgattttagttttttgttttgtttcgtttttttaaagttttttaatttatttgtttttatttttaggttttttttaatatatcgttttttttgaagcgtttttatttatatatatatatatatatatatatatatatatatatatatattttttttattgtattatttatttttagattttgtagggatatatgttttaattgaggtttttttttgttttttttaaattttgttgggtttttattgtttttttattagttcgttttttaattttattttagttttatttttgggaatttttttttttttttatttttttttttttagtttgttagaaatttgtatttttataaattttttagggttgattttagaatttttattatttgttaataagttaatgttttttttttttaaaattattttttaattaaagagtgtacgtgggattgggggtgggagttaaggagggaagggattggggagttaaggttggatcgggggaaaggtgagagttggtttttaggaatttgggtggttgaggagagaagtgtttttatttttacgaataattcgatttgcggttgttttttagttatggttgcgtcggggattaggaagtggtcgtttttgggggaattgggaggggttgggatcggggaaggcgggttttatatttagggatttttttttttagatttagggttgtttttttagtataatataagtttaattagatttatttgtatttaaattaggtttttttattagtttaacgtattttatatttagtttttttagttcggttttttttcgggttggattagagagtcgttgatttatcgatcggtttcgttttgaatttggggaggggattggaggggggcgggattcgacgatgtagggagtgagttcggaaggggaattttcggattttttataggatggggatgggggtgttaaggaggagttttgaaaatttttttgttttttcgattttttttgaatataggatttttttttgttttagtttttttgttttattaatttgagtataattcgattgatttttatataaaaaatttgatattaatagtttgggtatattcgtgaagatttagggatggggattttaaatggaaaggtggtcgtttaattattttgtattttttttagattttaatttaaattttgggttgttgggattgtggtttgagagaagaattcggaagtggaaggttgggattgtagataggaatcgttagttatgtagtttgggattagggaaggggtgacgttagtattttttgagttgtttagattggtgttttagtaggttttgtgtttttcgtagtttattgttttcgggtttagtttagtattaggatttgtagtttttgtggtttatatttgggattgggtataggaaatagagttaggggtcgggtgaggtggtttacgtttgtaattttaatattttaggaggttaaggggggtggattatttgaggttagggagttaagattagattggttaatatggtgaaattttgtttttattaaaaatataaaaatttgttaggcggggtggtgggtatttgtaattttagttatttgggaggttgaggtaggagaattaattgaattcgggaggtgaaggttgtagtgagttgagatggtgttattgtattttagtttgggtaataagagcgaaattttattttaaaaaaaaaaaaaaaaagaagaagaagaaaagaaaaagaaagtagagttagggatgggaagggagatgacgaagttttttgcgaaggaaatataaagtcgaggtaaggggttttgttgtagggaggggtttgtttttgtagtttggttagttttgtgtttttatttatgttttttattggggtttttttttgtgttttttgttttcgttttattgataggttgttttggagatggggtagaggggtgggattattatggttcgattttgaagtatgtgtatagggggtggggtaggggtgttgttagttggttttgttatggggataaagaaagattagatagaatagtgggagtagagtttttggggatatttaaataaataagtagggaggatataggaggagtagttttttttttagtaattttgatttttattaaatttttatgatttgttgaaaaaataaatttagaattttagtttttatattttgaattttttttttgtttaattattttttttttattttttttattattttttgtttaataaaagatttatagttttagaaaattatggtggagtgtaagaatatagaattaaaatagagtttgaaatttaaagaaagggagagatttgggggaggagtggggtggagtgacgtgatgtgttgttggaaattagtagttggtggtttttttttgtgtttttttttttgtgggtttttttttgtttgtgggagggttttttttttttttttcgatagaaaggttatttttggtgttcgtttttttgaattgtaatattttgtaagggtatgattttatgtttttgtgtgggtgtgaatttttttatggtgatttttaaaatttgtatataggatttttttttattgaggggaggggattaaaataattttattttttagggtttttttttgttttaattggtttgtgtttaagagaagttttaggtaaatggggttagtttgaagattaaataggtttggtagtttttttcggtttttttttttttttttatagttttatagttatagttgttttgatattaatattgattttggttggttggtatgattatttatagggtatcgtgttttaatttattaggtgataggtaacgttgtttttttttggaattatttagtagagttagggttgtatttttaaattttgtaatagaggtttttttttattttatttttttgtttttgtattttttttattttagtagtttttttttttttttttgggtttttttttttatttttttttttttttgggtttggtaaattagtttttaatttttttatattttagattggaaggtgggtttttttttgatattttttagagttgttattaattttttttaagtttttatagttttattgtttaatagatttgttaggggtaattattaatttagtttttaattttgtttttttattttttttgttggaggggattttttaattattggttagtatagttaggttattttatttttattattttttttaattttttgggttggggggttggggaggaatttttttattttagggtattaggaataaagttggggaggatggtgtatttaaagggattatatatatatatatatatatttttttttttttttttttataattttattttcgtaatatatatatatatatatatatatatatatatatatatatatatagacgtataaataagttttatggagtagtgattttattatgtttatcgttttgagtttaatttttggtttaaaataggtattaaatagttgtcgaatgtatgaatgatagatatttttttgtttttaggggtgtgtagaagtgcgaaggggtatgggtatgttttagtaggggtgtgagtgttttgattagaattatttttttttgttagaatttgatgtaattcgaatgtttttatttttgtttgaagggtttaaataataaattaggttttgtcgtgttattatgggggtggttatattttgtatttaggaaataggtacggtagggttgagatagaagttttgtttgttttcgtttatttatttgaaatatcgtttatttaggttttattttgtttgttaggtattgttttaagttttgtataaatattaatttagagggtataaatattaatttaagagttgttgtaggaaaaaaaataagcgtttttggttttttaagtttggttttttttttaaaattttcgtaacggttttaaattttttttagggattgggattacggattttggttcgattttttcgcgggttttttattgcgttaattaaattttagaaatagtgagtgttagaggttcggttgttaagtaacggtagagggcgggaagtttgaacgttttggattcgtttcgaaggtaaataggttaattagcgtttagattttttagttacggtagttcgtttttttttttcgttttgtcggatttttaggttggattcgggtttttttaattaatagcggttaggagggcggggcgcgtgcgcgcgtatttcgtttacgcgtcggcgcgttttttttgtaggttcgtggcggtcggttagcggggcgtttttttatttgtagcgatttaggttattgaaaaggcgggaaaacgttgcgatggcggtagttgggggaggaggaagataagcgcgtgaggttggggttttggcgcgtggttggtagaggtagagatataagacgtgtacgattcgttttatagggtttttagattttttttttttaaagggtaattttcgcgtgataggaatgagggtggggcgcgtggagttttttataatttgtattttagttaaatattcgagaatttattttttgtgtttatagttttttacgttttttagttttgtttcgtagttttgtagtagaagtatttagtgttttgtattttgcgcgttattttatttcggttttttttgtgaatcgttgttttcgaatcgtttttattttttgtattcgtaga

SEQ ID NO: 54 - DNA, 5455 bp, Artificial Sequence
  chemically treated genomic DNA (Homo sapiens)
tttgcggatgtaaaaagtgagggcggttcggaagtaacgatttatagaggaggtcggggtagggtggcgcgtagaatgtaaagtattaagtatttttgttatagggttgcggggtagggttgaggggcgtggagagttgtggatataggaggtgaattttcgggtatttaattaaagtatagattgtgggaaattttacgcgttttatttttatttttgttacgcggaggttattttttggaaggaaggggtttgagggttttgtggggcgagtcgtgtacgttttatgtttttgtttttgttaattacgcgttaggattttagttttacgcgtttatttttttttttttttagttgtcgttatcgtagcgttttttcgtttttttagtaatttgagtcgttataggtgggagaacgtttcgttgatcgatcgttacgagtttgtaaaaggagcgcgtcggcgcgtgagcgaggtgcgcgcgtacgcgtttcgtttttttagtcgttgttgattggagaggttcggatttagtttagagattcgatagggcgaggaggagaagcggattgtcgtagttgaagagtttggacgttgattggtttatttgttttcggggcgggtttagaacgtttaaatttttcgttttttgtcgttgtttagtagtcgggtttttagtatttattgtttttgggatttgattggcgtagtgggaagttcgcgagaaggtcggattagggttcgtagttttagtttttggaaggggtttgggatcgttgcgggggttttgagggggaggttaaatttaaagagttagaggcgtttatttttttttttgtaataatttttaagttaatatttgtattttttgagttaatatttatatagagtttagaatagtgtttggtaaataaagtaagatttaaatgagcggtgttttaaataaataagcggaaataagtaggatttttgttttagttttatcgtgtttgttttttgggtatagggtatgattatttttataatggtacgatagggtttaatttattatttaaattttttaagtagaggtggaagtattcgaattatattaaattttggtagagagaagtagttttgattagaatatttatatttttattgggatatgtttatattttttcgtatttttatatatttttgaagatagagaggtatttattatttatgtattcggtaattatttagtgtttattttgggttaggggttggatttaaagcggtgaatataatgaagttattgttttataaagtttatttgtgcgtttgtgtgtgtgtgtgtgtgtgtgtgtgtgtgtgtgtgtgtgtgtgttgcgggggtggggttatgagggagaaagaaaaaaaatatatatatatatatatataatttttttaaatgtattattttttttagttttgtttttagtattttgagatggggagatttttttttagttttttaatttaagaagttaggaaagatggtgggggtgagatgatttagttgtgttaattagtaattggaaaattttttttagtaagaaaggtgggggaatagagttaagggttgggttaatggttatttttggtaaatttgttgagtaatggagttatagaaatttggaggaggttggtgatagttttggggagtgttagggagggatttattttttaatttggggtgtgaagagattagggattagtttattaagtttaggaaggggagggagtggaaagagaagtttagagagggaaagaggagttattgagataggagaaatgtagggatagggaggtgagatggagggaaatttttgttgtaggatttgggggtatagttttggttttgttggatggttttaggagagggtagcgttgtttgttatttggtaaattaaggtacgatattttgtgggtagttatgttagttagttaaagttaatattgatattaaggtagttgtagttataaagttgtaggagagaaaagagaggtcgggagaggttgttaaatttgtttgatttttaagttggttttatttatttaaggttttttttggatatagattagttggaataggagaggattttgagaagtagagttgttttgattttttttttttaatgggaaggggttttgtgtgtagattttgagggttattatgagggaatttatatttatatagaggtatggaattatatttttataggatgttatagtttaagggaacgaatattaaagatagtttttttgtcgggaggagagaaaaaggtttttttataagtaggagaaaatttatagaagaggaagtataagaggaaattattaattgttggtttttagtagtatattacgttattttattttattttttttttaagtttttttttttttttaagttttaagttttgttttagttttgtgtttttgtattttattatggttttttggaattgtaggttttttgttggatagagggtgatgaggaggatagagaagggatggttggataggagagaaatttaggatatggaggttggaattttgggtttatttttttagtaggttataaaggtttaatagaaattaaggttattggagagagagttgttttttttatgttttttttgtttatttatttaggtgtttttaaggattttatttttattattttgtttgatttttttttatttttatgataggattagttaataatatttttattttattttttatatatatattttaggatcgggttatgataattttatttttttgttttatttttaaggtaatttgttagtgagacgaggataaagggtataggaaggggttttaataggaaatataagtggaagtataaagttgattaagttataggaatagatttttttttgtaataaagttttttgtttcggttttatgtttttttcgtaaaagatttcgttatttttttttttatttttaattttattttttttttttttttttttttttttttttttttttttttttgagatggagtttcgtttttattgtttaggttggagtgtaatggtattattttagtttattgtaatttttatttttcgggtttaattgatttttttgttttagttttttaagtagttgggattataggtgtttattatttcgtttggtaaatttttgtatttttagtagagatagggttttattatgttggttagtttggttttgattttttgattttaggtgatttattttttttggttttttaaagtgttgggattataggcgtgaattattttattcggtttttaattttattttttatgtttaattttaagtgtaggttataaggattgtaagttttagtgttgagttgggttcggagatagtagattgcggggggtataggatttattgagatattagtttgggtagtttagggagtgttggcgttattttttttttaattttaggttgtatggttaacggtttttatttgtagttttagttttttattttcgagttttttttttagattatagttttagtaatttagaatttggattggagtttggaagaaatgtagaatgattaaacgattatttttttatttgaagtttttatttttgaatttttacgggtgtgtttaagttgttagtgttaagttttttatatgagggttagtcgggttgtatttagattaatgaagtagggaaattgaggtagaaaagagttttgtgtttaggagaggtcggagaaataaggaggtttttaggatttttttttaatatttttatttttattttgtgggagattcgaggatttttttttcggatttattttttatatcgtcgagtttcgtttttttttagttttttttttaggtttagggcggggtcggtcggtgagttagcggttttttgatttagttcgggagaggatcgagttggaggagttgggtgtggggtgcgttgggttggtggggaggtttagtttgggtgtaagtaggtttgattgagtttgtgttgtgttgaagggatagttttgggtttaggggagagagtttttgagtgtgagattcgtttttttcggttttagttttttttagtttttttagggacggttattttttggttttcgacgtaattatggttgaagaataatcgtaggtcgaattgttcgtgaaggtaagaatatttttttttttagttatttaaatttttggaagttaatttttatttttttttcggtttagttttaattttttaattttttttttttttgatttttatttttaattttacgtgtattttttggttgaggggtggttttgagaggggaagatattaatttgttagtaagtaatgagaattttaggattaattttgaaaagtttgtaaaagtgtaagtttttagtagattaaaggaagggaagtggagaaaaaggagaatttttaaaagtgagattggggtggggttagagggcgagttggtgaagggatagtgggggtttagtagggtttagaagggatagaggggaattttagttaggatatgtgtttttataagatttgagggtgagtagtgtagtaggagaggtgtgtgtgtgtgtgtgtgtgtgtgtgtgtgtgtgtgtgtgtggatggagacgttttagggaagacggtgtgttgagggaggtttgagagtgagagtaagtaaattgggaagttttggaggggcggaataaaataggagattgggatcggagtttgaaaagtagagttggagaggtgatcgggtggtattgaatatttttaggattggggaaagggatagaaggggaggtggtaagaagacgtgagtttaacgtagttattataaggatgggtgggagagagattagacggaggagaagagttcggttagggtattttgggatttgggggttggagaagtagaagatttgttttaatttttttttttttttgcgggtgtgggtaaggagagatggttttatggtatttgggtagtaaaattgtaggtagtaggtttttcggtgttatttagtttttttttgattgtagcggtcgtttttttttttatcgttgttgtatttattttttagttttgggattttttggttgtgttttttttttttttttttaatagtgttttttttttttcgtttcgtttgtgttttttcgttggtacgtacgtttttttattttttatttttttgtcgtttttttttttttttttttttttttgttttttttatttttgtgtgtttttgtttgtgttttttttttttttttgtttgggtttttcgggtagttattttttttttttgggtttagggaagtcggagtttgtttgggttcgtttttttaggtgtggtttttattttatttttatattcgttttcggggttatttttattcgtgggtgaggttgtgtcgtaga

SEQ ID NO: 55 - DNA, 6482 bp, Artificial Sequence
  chemically treated genomic DNA (Homo sapiens)
ttgttgagaaagagcgttgcgtggttttttgaaatttgttttttttaattattatttagtttgtgaggggtttatttttgttttttaaagttgttagaattagttttattcggtaggggtttgggttggtttttattatttttttttttttatattaattaatagttacggtttttagattataggtttatttttggttttatttttttaaggaggggaattaaaatggtcgtgtttcggttaagtgcggtggtttatatttgtaattttagtatttcgggtggtagaggggagagggttacgttagtttaggagttttagattagtttgggtaatatagtgagattttgttacgataaaaattataaaatttagttaggcgtggtgttgtatgtttgtagttttagttatttgagaggttaaagtaggaggattacgtgagtttggtaggttgaggttgtagtgagttatgattgtgatattgtatttcggtttgggtgatagagtgagattttgtttttaattaaataataataaaatggtcgtgtttttttagatgttatttgattaatattttaattaatttagataattggtatttttattttttttgttttattgataatatttttatcgttgtaatttgagttgtaaagattcgtggatatagggttcgggattattttagtttcggaggtttatttatttatttataggttgtttcgtatttatataaataatttttagaataggatgtaggacgtttgtttttttttttgttttttgagatagttttgttttgttgtttaggttgtagtgtaatggtataattttagtttattataatttttgttttttgagtttaagcgattttttttttttagttttttaagtagttgggattataggtgttcgatattatgtttagttaatttttgtatttttagtagaaatagggttttgttatattggttaggcgggtttcgaattttttattttaggtgatttatttattttggttttttaaagtgttgggattataggcgtgaattattgcgttcggttaaggatatttgttttttatatttatttttggtagcgtacggttagtacgttttagatgagttgttgtagaggtagtaattattttttttttagtagatttgagtatgagaggtttaggttttattgtttttttatatataaatgttgggtaaggtaagggtagagtttttaggtgttttattagtaatttgtatttttaaaatgattattttttgttttgtttataagttattaggaaagtttggtaatgtttgtttaaaataaatatttttatgttcgtgaggtcgtttaatattatcgattagttatttttttaaaatggtattaagattagcgtgtttaggattgttttttgtggaataaatttttttttgattttttttggtttgaatttgtaataggagagagcgagtgagtatgcgtttttattagttattataaatttttttttttttttttttttgagatagagttttgtttcgttatttagattggagtgtagtggggcgatttcggtttattgtaatttgtgtttttcgggtttaagcgatttttttgttttagttttttaagtagttgggattataggtatgtgttattatgttcggtttattattttttagtatagacggggtttcgttatgttggttagagtggttttgaatttttgatttcgtgatttatttatttcggttttttaaagttttaggattataggtataagttttcgtattttcgttcggtatagaaattttttttggtgttgttagaaaagtttaatttttttgttttttatttttacgtttgattggttttttaaggttgtattcggggtatttttagtagtttttttattattacgatgaaagttaaatttttttaaaatagtgtaaattggttgggcgtagtggtttacgtttgtaattttagtattttgggaggttgaggtatatggtttacgaggttaggagtttaagattagtttggttaatatggcgaaatttcgtttttattaaaaatataaaaagtcgggtgtggtggcgtgtgtttgtaattttagttatttaggaggttgaggtaggagaattgtttgaatttaggaggtagaggttgtagtgagttaagattgtgttagtttgggcgatagagtaagattttattttaaaaaaaaaaaaaaaaaaaaagtgtaaattagattatcggtagttagttgttaattatgtttttaaaaaaagtaaatttaggttttgaatagtttacgtgtttttttttagtagtttaattggataaatttatttttttaaattttttggtttttgcgattttataaatttgttttattattcggatgcgattgttgaggttatattttatgtttagtttttggagagagatgaaagaagaaaaaggggttagtgtttaggttacggtttttttaattgtaagttataaattatttaaagatttttattgtattttttagattagagatttaaaatagatttttttggaattaagatttatttgacgagtcgcggtggtttaggtttgtaatttttgtattttggggggttaaggtaggtggattattagaggttaggagtttgagattagtttgtttaatatgatgaaattttgtttttattaaaaatataaaaaatttgttgggcgtggtggtgggcgtttataattttagttattcgggagagtgaggtaggagaattttttgaatttaggaggcggagattgtagtgagtcgagatcgcgtttttgcgttttagtttgggtgataagagcgaaattcggttttaaaaaaaaaaaaaaaaaaagatttattgaggggttttattgttttatttcgaggagttgagaatgtgtaatttttttttataattgtaaatgttgtattgagataaaatataatatgaaatataattttaaattgtataatttttttttagacggagttttgttttttttttttaggatggagtgtagtggcgcgattacggtttattgaaattttcgtttttcgggtttaagtaattttcgttttagtttttcgagtagttggaattataggcgtttattattatgatcggttaatttttggtatttttagtagagacggggtttcgttatgttggttaggttggttttaaatttttgattttaggtgatttattcgtttcggttttttaaagtgttgggatgataggcgtgagttatcgtatttagttaggatggattatattttatttattagttgatgaacgttttagttgtttttaagtagaaaattttataagtgtaaaaatttagtatttatttatgggtaaaatataatgttaggtatgtgtgataaagatataaatatatataaaagataacgatttagtttatgtgcgatggtttatgtttgtaattttagtattttgggaggttaaagcgggtagattatttgaggttagtagtttaagattagtttggttaagatagtgaaattttatttttattaaaaatataaaaattaaatgggtgtggtggtacgcgtttgtagttttagttatttaggaggttgaggtaggagaattatttgaaattgggaggtagaggtagtagcgagtagagattgtgttattgtattttagtttaggtaatagagtaagatttagttttaaaaaaaaaataaaataaagaatttattttttttaggaatttatattttattatgtaatatttggatatatttttatttgtgaagatgatgatatttaggttttatttataagatgggtttttttttattaatatttgaatagtaatttaagtgtgtttgaattaggttattaagattttgattttcgaagttttttgaggaaggatatgtcggtttttaagtattggagatagtatttttgtgtagatagttgttagtaattcgttttttatagaatttggtgtaagattaaatttagttttttttgtatttttttttagtttagtaaagatataggtagtttatttatttttagtattttcgcggtgatgataaatttcgtttgtttattttttgtagatttgggatttggtttcggtgtttttagttttaatagaattttaaattttttttttaagtttgaatttttgtttgttggtttggttatggtggattaggacgtattagaaaatttttttgtgtaaacgaaataggaatggggatatttgagtaatatttttgtttattttttttattgcggatttttagtcgttaggattttgggtttttggtgggtataatttttttttttatattttttgggagaatttaattatagtttagttgattagttcgtaaataggtatttaggaaagttcgggagatattaggtttggtttagagagttttttatttagacgttgtcgttcgtttcgttcgatttagtgtacgggttaggattgtcgtcgcgaagttttgggagtttcgacgtttgtcgttttttttttatttatgtgaagtaggagttgttacggagtcgtttgtagtagagattcgttcgtattcgttatgatttaaaattaagggatgttcggagtttcggagtcgggttgtagtgggcgcgggtgagggttcgggattcggatattgcggggttcgtttttttaggtcgttgtttcgtggggatcgttatttgtttcgtggggatcgttatttatttcgcgtcgcgttatcgcgtttcgggtcgtttcgacgcggagaaaggcgtatttttttggtttcgggacgtcgtcggaagcgcgattcgtattttcggtagcggtattgcgcggagggtcgttttgggagtttgttgggagttgtagttttgtgtcgttttttggcggaaaggtcggcgatttttgtattacgtgacggggtcgtatgggtcgtcgggatgtgtagttcgtaggagttcggtatgatcgttttgagcgcgaggatgttgattcggagtcggagtttgggattcggggttgggtcgcgggggtgtagggaggagttcgggttttttcggagaagagaggttgtagtaggtagcgtcgcgtcgtggttggagcgtgggaggaggcgggataggggttgtaggttggagtttcgggtcgttttttgcggtttttagttgcgcgggtaggggttgtaaattcggtagtcgcgaacggtttttacgtgcggttttgcgtttttattttgcgttttttttttaaagattgcggttcgtaggggttgggtttcgggcgtttcgtttcgttgttttttttcgttttaagtaagaaaacgtttttttttttattattttgttcgggattttttattttaggttttgtgggttttattttcgtttttttgtagtgaatttgttgttttcggagaggttgggtgttaaggatatacgtagttagaagtttgtttttttagttcgggggagggtgtttttgagggaaaataggaaagggtatggtatttattatatttattttgtagtcgttgaggatttgttgggggttaagtattgtagtgagtagtgagggatacggatagggtttttgcgttagtttcgttgggatttttgtagaattggttagagttggatttttataggtatttagggattttaggggtagtttagattatgttaggaggaattggtgtagttgggagtaggtaggtggtgatgttagttagggtggtaggagttttgatgttaggatagagtttggagtttattatgatagtaaacggaagttaattaggaggttttgttgtttgttttgagatcgggttttgttttgttatttaggttgtagtggagtgttgtgattttagtttattgtaattttcgttttttaggtttaagtagtttttttgttttagttttttaagtagttgagattataggtttttgttattatattcggttaatttttgtatttttagtagagatggggttttgttatattggttaggttggttttgaatttttgattttaagtgatttatttatttcggttttttaaagtgttgggattataggtttgatttatcgcgttcggtcggttaggattttttaaaagggagtgatataatttgatgtgggtgttagtagattgtttttggtgtagtatagaagatgtattgggggtattttggtataggttgttgttagagtttttatgagttaatatggattttgttagggtcgttggtataaggagggtttatatattttagattgtagagggtagagtattttaagtgtattagatgatggatagttgtggtatgaacgagtgaggggtgagttagtaggcgggatggtatttttattttatttttatttgtggttttattagagggattgcgtggtgttttttgtaga

SEQ ID NO: 56 - DNA, 6482 bp, Artificial Sequence
  chemically treated genomic DNA (Homo sapiens)
tttgtaaaaagtattacgtagtttttttggtggggttataggtgaaggtagggtaggggtgttatttcgtttgttagtttattttttattcgtttatgttataattgtttattatttaatatatttggggtgttttgttttttgtagtttggggtatgtgggttttttttatgttagcgattttgataaggtttatgttagtttatgaggattttagtaatagtttgtattaaggtgtttttaatatattttttatattgtattagagatagtttgttaatatttatattaggttgtgttatttttttttaaaaaattttggtcggtcgggcgcggtggattaagtttgtaattttagtattttgggaggtcgaggtgggtggattatttgaggttaggagtttaagattagtttggttaatatggtaaaattttatttttattaaaaatataaaagttagtcgggtgtggtggtaggggtttatagttttagttatttgggaggttgaggtaggagaattgtttgaatttggggggcggaggttgtagtgagttgagattataatattttattatagtttgggtgatagagtaagattcgattttaaaataaataataaaattttttaattgattttcgtttattgttataataaattttaaattttattttggtattaaagtttttgttattttggttggtattattatttgtttgtttttagttgtattagttttttttgatatagtttggattatttttggggtttttgggtgtttatgggaatttagttttggttaattttgtagaagttttagcgggattagcgtagaggttttgttcgtgttttttattgtttattgtagtgtttggtttttagtaggtttttaacggttgtaggataaatataataagtgttatgtttttttttgtttttttttagaggtattttttttcgagttgggggagtaggtttttggttgcgtgtgtttttggtatttagttttttcgaggatagtaagtttattgtaggagggcggggatgggatttatagagtttggagtggagagtttcggatagagtggtgggaaaggaagcgtttttttgtttggggcgaaagggggtagcggagcggagcgttcgaaatttagtttttgcggatcgtaatttttgggaaaaaggcgtaaggtgggaacgtagggtcgtacgtgggaatcgttcgcggttgtcgggtttgtagtttttgttcgcgtagttgggagtcgtaggaggcggttcgggattttagtttgtagtttttatttcgtttttttttacgttttagttacggcgcggcgttatttgttgtagtttttttttttcggagaggttcgggtttttttttatattttcgcggtttagtttcgggttttaggtttcggtttcgggttagtattttcgcgtttaaggcggttatgtcggatttttgcggattatatatttcggcggtttatgcggtttcgttacgtgatgtaaggatcgtcggttttttcgttagagggcggtatagaattataatttttagtaagtttttaaggcggtttttcgcgtaatgtcgttatcggaagtgcgggtcgcgttttcggcggcgtttcggggttaggggggtgcgttttttttcgcgtcggggcggttcggagcgcggtggcgcggcgcggggtaagtggcggtttttacggggtaagtggcggtttttacggggtagcggtttagagaggcggatttcgtagtgttcgggtttcgggtttttattcgcgtttattgtaattcgatttcggagtttcgagtattttttagttttaagttatggcgggtgcgaacgggtttttgttgtaggcggtttcgtgatagtttttgttttatatgggtagaggagagacggtaaacgtcggggtttttaggatttcgcggcggtagttttaattcgtgtattgagtcgggcggggcgggcggtagcgtttgagtagagagttttttagattaggtttggtgtttttcgggtttttttaggtgtttgtttgcgagttggttagttgggttgtagttgagtttttttagggagtgtgggaggaaaggttatgtttattagagatttagggttttgacggttggaggttcgtagtggggaaggtgggtagaggtgttgtttagatgtttttatttttgtttcgtttgtatagaggggttttttggtgcgttttggtttattatggttaaattaataagtaaagatttaggtttgaaggagaagtttaagattttgttgggattgggaatatcgaggttaaattttaggtttgtagagggtaaatagacggagtttattattatcgcggaaatattgagagtgagtgagttatttgtgtttttgttaggttagagggaaatgtagagaaggttgggtttggttttgtattaggttttgtgggagacgggttgttggtaattgtttatataggaatgttgtttttagtatttggaggtcgatatgtttttttttaggagatttcgaaagttaggattttggtgatttggtttaggtatatttgagttattatttagatgttgatgaaagaaagtttattttatagatgaggtttgagtattattatttttataggtaaggatatgtttaggtgttatatgataagatgtgagtttttgggagaagtaggttttttattttattttttttttgagattgagttttgttttgttgtttaggttggagtgtagtggtataatttttgttcgttgttatttttgttttttagttttaagtggtttttttgttttagttttttgagtagttgggattatagacgcgtgttattatatttatttaatttttgtatttttagtagagatggagttttattattttggttaggttggttttgaattgttgattttaggtgatttgttcgttttggttttttaaagtgttgggattataggtatgagttatcgtatatgggttaggtcgttattttttatgtgtgtttgtgtttttgttatatatgtttggtattgtgttttgtttatgagtaaatgttgaatttttgtatttgtaaagttttttatttagaaataattaaaacgtttattaattgatgaataaaatatagtttattttggttgggtgcggtggtttacgtttgttattttagtattttgggaggtcgaggcgggtggattatttgaggttaggagtttgagattagtttggttaatatggcgaaatttcgtttttattaaaaatattaaaaattagtcggttatagtggtgggcgtttgtaattttagttattcggggggttgagacgagaattgtttgaattcgggaggcggaggttttagtgagtcgtgatcgcgttattgtattttattttggggaagaagagtaaaatttcgtttaaaaaaaaattgtgtagtttgaaattgtattttatgttatgttttattttaatataatatttgtagttgtgaaaaaaaattgtatatttttaatttttcgggatggagtagtaaagttttttagtaaatttttttttttttttttttttgagatcgagtttcgtttttgttatttaggttggagcgtaggggcgcgatttcggtttattgtaattttcgttttttgggtttaagggatttttttgttttattttttcgagtagttgggattatagacgtttattattacgtttagtaaattttttgtatttttagtagagatagggttttattatgttgggtaggttggttttaaatttttgatttttggtgatttatttgttttggttttttaaagtgtagggattataggtttgagttatcgcggttcgttaagtgaattttgattttagaaagatttgttttaagtttttagtttggaaaatgtagtgggagtttttaggtggtttgtgatttgtagttaaggagatcgtggtttgagtattggtttttttttttttttttatttttttttaggaattgagtatggaatgtggttttaataatcgtattcggatgatagggtagatttgtgaagtcgtaaaaattaagaaatttgaagaggtaggtttatttagttgagttattagagagaggtacgtagattatttagagtttgagtttgttttttttaggaatatggttgatagttgattgtcgatgatttggtttgtattttttttttttttttttttttgagatggagttttgttttgtcgtttaggttggtataattttggtttattgtagtttttgttttttgggtttaagtagtttttttgttttagttttttgagtagttgggattataggtatacgttattatattcggttttttgtatttttagtagagacggggtttcgttatgttggttaggttggttttgaatttttgatttcgtgaattatatgttttagttttttaaagtgttgggattataggcgtgagttattgcgtttagttagtttgtattgttttaggggaatttagtttttatcgtagtgatggggaagttattggaaatgtttcgaatataattttgagggattaattaagcgtggaaatggggagtaaagggattaggtttttttagtaatattagaaaggatttttatgtcgagcgggggtgcgggggtttatgtttgtaattttaggattttgggaggtcgaggtgggtggattacgaggttaggagtttaagattattttggttaatatggcgaaatttcgtttgtattaaaagatgatgagtcgggtatggtggtatatgtttgtaattttagttatttgggaggttgaggtaggagaatcgtttgaattcgggaggtataggttgtagtgagtcgagatcgttttattgtattttagtttgggtgacggagtaagattttgttttaaaaaaaaaaaaaaggaagagtttgtagtggttgatagaaacgtatgtttattcgtttttttttgttataagtttaggttaagaaaaattaagaaagggtttgttttatagagaataattttaggtacgttggttttggtgttattttgggagggtgattggtcggtggtattgggcgattttacggatatagaaatatttattttgggtaaatattgttagatttttttgatgatttgtggataggataggaagtggttattttgggagtgtaggttgttggtagagtatttgagggttttgtttttgttttgtttagtatttgtgtgtgggagagtagtgagatttggattttttatgtttagatttgttaagaggagagtgattgttatttttgtagtagtttatttgaaacgtgttggtcgtacgttattaaagataggtgtaaagaataggtgtttttagtcgggcgtagtggtttacgtttgtaattttagtattttgggaggttaaggtggatggattatttgaggtgaggagttcgagattcgtttggttaatgtggtaaaattttgtttttattaaagatataaaaattagttgggtatggtgtcgggtatttgtaattttagttatttgggaggttgagggaggagaatcgtttaaatttaggaggtagaggttgtggtgagttgagattgtgttattgtattgtagtttgggtaatagagtaagattgttttagaaaataaaaaaaagaataagcgttttgtattttgttttgaaagttgtttgtgtgggtacggggtagtttgtgagtggataaataggttttcgaggttgggatggtttcgggttttgtgtttacggatttttgtagtttaggttgtaacggtaagagtattgttaatgagataaaggaggtgagagtgttagttgtttgaattggttgggatgttggttagatgatatttaaaagaatacggttattttgttattatttggttagagataaggttttattttgttatttaggtcggggtgtagtgttataattatggtttattatagttttaatttgttaggtttacgtgatttttttattttagttttttaagtagttgggattataggtatgtagtattacgtttggttaagttttgtaatttttgtcgtgatagggttttattgtgttgtttaggttagtttgaaatttttgggttgacgtgatttttttttttttgttattcgaagtgttgagattataggtgtgagttatcgtatttggtcggaatacggttattttagtttttttttttagaggagtaaggttaggaatgagtttgtggtttgaaagtcgtggttgttggttaatgtggagaagggaaggtggtgagagttagtttaaatttttgtcgagtgagattgattttggtagttttagggagtagggatgagttttttataggttgggtggtagttagaggaggtagattttagaaggttacgtagcgtttttttttagtag

SEQ ID NO: 57 - DNA, 13131 bp, Artificial Sequence
  chemically treated genomic DNA (Homo sapiens)
  unsure (1578, 1592, 1719, 2284): n is a or g or c or t
taatgagtttggggttgtagtaatttagtttgttaattgagggtttagtattttaataatgtggtgttattgttgtatattagttaaatattagtgtttttttgatatgaaatttatgttttgagttttgtgattttatttttaaaatattttttaaaattatttattttggtttatttttattgtaatattgtagtatagaatatttttttttattgtaatagtattttgattgttttttgttttaaattttttaaaaattgtttttaaatgaggttgggaattttaataaatttagttattttattattatgtgtttggggatagtgttgggtgtgtttataatagagtgtttaatattgttggtttttggttaattaaagatgagtattaaaattatgtatggtggaatgtatttttatttttagttatttaggaggttgaggtaggagaattatttgaggttaagagtttgaggttgtagtgtattatgtttgtatttgtgaataattattattttgtagtttgggaaatatagtgagatttttattttttaggaaaaaaaaaagaaaaaaagatgagtattatatttagtagaaatatttttttttttatttattatagtgtcgttcgttcgtttaaggtgtagtattattattttaagtgtttaatttaggtttttatattatttttcgggggagcggataatttgtgatggattaggttgtatgttttttttgagaattttatgtttgatgatttgttattgttttttattatttttagatgggattatttagttgtaggaaaattagttaagggtttttattgattttatattatggtaatttatataattattttattatatattataaggtaataatagaaataaagtgtatgataaatgtagtgtatttgaattatattaaaattatttttttcggtttttggtttgtggaaaaattgttttatataaaattgttttttggttttaagaagattgggggtagttgttataaattataggataaatttcgtagtaaagaattatttggttttaaatgttaatggtattaaggttgaaaaattttgatttaatttttttattttaagaaattataatttttttttttgtaaattattataatgatattgaagttatgatgggtttttaggggaatgtaattggtttattagttaattgttaggaatgtataatttttaaaaataattgtaaaatgttgtattttgaatttagggaaatattaattttgagaaaagtgaagggttgggtattatgtttaatatttgattagtagtaatttgaattttgttaaaataattagatgataataaatattatatttaattttaaaatatttgggtaattattaataagtattaaagaaaatattattgttgatataatggatgatgattttggaaagaattatttggttatttagtaatagtttattaatttttgtgtattttagttatgtatgttagattagggtagtttatatattagtagatattattaaagtatgaatcgagttatatgtgaaatgtatntttaaattaatgtnatgttttagtattaatttgttatttagattttagaatatatgttaagaatatggtgagaatagtaatatttgaaatttatttattttattttagtgataatataggaatgtgatgtaaaataaattntttatttttgtttttaatttgttattgattatattttgataatttataggtgggtttatttagatttattttttgatatataaatatagattgagtatgtttaatttgaaaatttgaaatttgaaatgttttaaaatttaaaatattttgagtgttgatattattttataaatggaaaatttaatattttgtgatttttgttttttgttttgttgatgtgtataaatttttgtttattgtttaaaattaattgaaaaaatttgttgaaaatattttttacgttattgtgataaggggtttatttaaataaaaataaattggtgtgttgagaatttaatgttattttttatatttttattttgttttttcgaattgggtttaaaatttaaaaattttttaaaatcgtaaatatttttttggttacgattttttgatattttatttatattttgtgtaatattttttataatatgaattgttattttttttttttttttgaaatcggaattttttaaattaatttgaattgtgttttatttttttttgtggtattaagagagagatnggtttttattgatattatttatttttattcgggttaagcgattttttgttttagttttcgagtagttggattatagtatgcgtattatgtttcgttaatttttgtattttagtagagatgaggtttattatgtggtttaggttggttttgaatttttgattttgtgatttgtttgttttgtttttttaaagtgttgggattttaaatgtatagttgagtggtattaaaaatatttatattgttgtgtaattattattattattatttatatttagaattttttttattttgtaaaattaaaaattttgtatttattaagtaataattttttatttttttttttttttaattttcggtaattattaaatttaaaatttttaagtgtttagtataatgtgaaatttttattagattatgtataatatttgttaaagtttaagtaataggaatattgaagaagggaatgttgagtaagataatatgaagtaagttaatttttaatgtatatgttagttatatatttcggttgtttatgatacgggtatttggatttattttattgtgggtaattttaacgtttatgtttgttttgtaggaagtaatgaaatgaattaatattgatataattggtaatttaatatttttaattttgatatgataaggtatttgtgttgcgaggattatttttttttagttattttgaagtagtatataaatattatttaaaatatgttatttgtagatgttgatgatagtagtaaagaatttttagtatttgattttagggtaagataagatttgttattatggttttatttgaaaaaatagttataatgtttttttaaaagtttgttttttagtatgttgttttattgaataggaaaatttaaattgaaagagaaaatttatatttttttatattatgagagtaaagtgaaaagttaaaagttaaatttattaatataataaatttatattaaaaagaaaaagtagaatttatcgagttagtgtgttaagtagttagatttttatatttgatttaatgtatttataaagaatggttagagtttagattatttttttttgaatatttaatgtggaaggtatatgttgttgatataatgtggtgtaaaatttatatggttaagggataatgtttgttttttaattttgtgattaaattaggtgaaaataaggagttttttgaatatttttttagttaaattaaaaattttagtttttttttttttttttaaaaaaggttttttttttttttttttattgaagatggattttaaaggaagaattgataatagtttttagtttttttaatgatggtgtttatttgagattaagaattgtttaaaataaaattgttttgaagaatatttattattcgacggagggggaaaacgaggttagattatatttggaatagttgtgattttaaaatatataaacgtttgtattacggagttagtatatagagaggaattttttataattttttttagtaaatgttttcggagtataatgtttttttcgttttagagatttatagaataggtattaagggttaaggggacgaaaagttagttatattaagatcgttaaagtttttaatttatatgtgtaaatttttcgtttaaatatttatgatttattatatattaaattattatgttatatttagaatatgttaatatttaagatagtttttttacgttttataggatggaggtttgaaatttatattttagttggaaggtaaagttggtgcggtatttattttattttaattagaaaatttttttttagtaggtttgtcgcgttgtttacgattggtaaataatgattttatagatcgtgaagaggttgttgttttgttttcgtcggtgttttcgaagacggcgattcgtagcggtttttaggggagttttttttgttagatcgatagttcgagcgttttgggttagagaaaatttagtaaaagtcgtcgttgttattattttagcgttttttttaattcgttttttttttttcgcggtcgtacgttacgttaggattttggtaagataacgaggatttgcgtagggggcgagtttttgaggttatttggtttttacggttacgtagggcgtcgtagatgtagtcggagttcgttttttttttttaggacgatttttaggtcgttagtagttttttatcgacgaaggcgattgtatagcgtttatcgcgttcgtgtttatttattcgtcgttttatttcggtcgtcggttcgtagtaggattagttcggttgttatagtcgcggatatacgtttttaggttcggttgcgtagtttgcggaagttttttcggatagattcgttgttagcggattggttgcgagtagcgttaattttacgttgttttcgggcgaggcggatttagtgtcgcgttttttgtaatcgttttgttcgcgcgcgtgcgtgttgggtgcgggtgcgggtgcggggttgggtttgcgtatcgggtgagacgttggttgtttgcggttagtggatggtaattgtttgtttcgcgttagtaggaaggtagtgtggtgtgattaacgggtatttattatattttcgatggttcgagggtttcgttttttttattcgttttggttcgggcgcgaacgttatagggtagttaagggcgtttacgcggggcgggaagcgaagtcgggtttgcgggcgcgtatacgtggaacgcgttttttgagtaggtttgggtttcggggtgttttggtttggtttttgttgcgttttattttttagatttttttgggtggaggatttaaaatttgttttttaggtagtagatttaatttatggtaattgtaatttattttgtgtgagtggcggtttatagtattgtattttgtggtattatataaggggtgtaagttaaattttttaaagttaattacgatttttgtttttggttttttgggtttattcgtacgtcgaagataggtatttgtattatatgttaaggaaatgtgaatattaaaaattgattttgaggaaagttttgattaggtttttttggaatcgtttttgaaatgtaattttttttattttggtagtgtagaaagtttgtgatttttattgtcgaaatagtttttaatattttgaaattgatttaagagaatgttggttgtgtatgtttgtattttgtatttttgttggttttgtgaatttaattgttttggatttagtttgatttttaaataaatgatttttttgtgttttttttaatggaagtttgtgagttttttgatttttattttttttttaggtatatttgttgtttttaattgatttttcgggttattagtatttttttagaagtgtttttttttttttttagtaaatatggaagattgattattttgatatttttagatattttttgttgtgatttgtaagttcgatataaatttttttatttggtatatatatggtatagagtgttatattttaggggttatgttagcgatgtgtgattgatataaaatttttgtttttaaagaattttgagttaggagtaatagatagaaatatatattaatagagtaatttgtgatgaggttaattagaaatgaggtaaagggggattgtaggggaaggaatatttaatttgttggtaggtgaaggaaaggaggttgtagtagggaagaaaggtttgaagagttgatattgaattaaatttggaaggatgattagaagttagttgagagagaattatgtgagttgaggaaggagtgagtgttattatgttaagagagataagttggttgggtacggtggtttatatttgtaattttagtattttgggaggttaaggcgggcggattatttgaggttaggagttcgagattagtttggttaatatggtgaaattttgtttttattaaaaatacgaaaattagtcgggcgtggtagtgcgtttttgtaattttagttatttgtagggttgggataggagaattgtttgaatttgggaggtagaggttgtagtgagttaaaatcgttgtattttggtttgggtaataaagtgagattttgttataaaaaataaaaaataaaaaaagacgagttgtgtagtatgatcgttttagagtatatttgggtaacgatgggatgattgggagaggaggtaaaaatttagttgttaagaagtttgtatttaatttggttggtaattggaaatttttataaaaattttaagtggggtagtaatatgatgaaatttaaatatagaaagaattttataggtggttgagattcgagttaaaatattaattaggtggttattgtagtagtttaggagagaaaggtcgaatggaggtagtataaagaggagaggattagtttgggaaatatttagatagtaggagagagatgattgggtggtaggatgtagagagcgagtagaatttttaggatgattttaaggtttttaattttgttttatgtgtttggatggaaggtgtttgagagtatggtttttggagttaaatatgttaaggtgtgtatttgttatttaatagttttgtgattttgagtaagttattatgtttttaaattttatttggtgataaaggatgatagaatacgtagagttgttgtgaggattaaataggataatatatataaaatttttatgttggttattatttttattattaaataagaaatataggaagaaagttgattagaggttagtcgtggtggtttacgtttgtaattttagtattttgggaggtcgaggcgggcggattatttgaggttaggagtttgagattagtttggttaatatggtgaaattttggttttattaaaaatataaaaaattagttaggtgtggtggcgggtatttgtaattttagttattcgggaggttgaggtaggagaatcgtttgaattcgggaggtggaggttgtagtgagcggagattgtgttattgtattttagtttgggtaataagagcgaaatttgaaattttgttttaaaaaaaagaaagagaaagattttttgattagtttgggatatgttatgtttaggttgtttttaggttatttaaatgatgatatttagaaggtagatggaagtaaggttttaaagtttagaaaaaaagtgtgagatataggtgagttggaggatggtgtggaagttaattgaaattatgtatataaagggaaggaggatattttttttaatgtttgcgtttagtaagaaagatgttgataaattatatttagtggttttttattaatatttatgaagtgaagggtttgttatgggtgaagtatttgattgttttgtttggtattttagagatatataatatataattttttatatttaaaagttgtatagtaggaacgaaaaaggtttatcgtttagggtagagatgtagtaggtttagttagataatgtaagtggtttaatcgttataggtatcgtatattgatgtataggataagatgatatgtgatgttgtggatataattgattagttacggacggtattgagatgatttgtatttggttgatgtgtcgttgagttttttttaatggtgagattaagtaatagtatattaatttgtgtatataattcgttcggaggtatagtgtttggtaatgtatttggttgaaattgacggacgttgtaattcgcgttgttttgtgtgatgttcgtggtcgatgttaggtatatttattttgtgtttgatgttgaaaaatagggtggggagaagtaaacgttatttttttttgatgtaagaagtttaattatgattaattattgtattggttttatagagttgttataataaagtattataaattaggtggtttagaataatagaatttattgttttttatttttcgagattagaggtttaagattaagttgttgatagggttgattttttttttttgatggatataagggatgaatttgttttatgttttttttttagtttttgatgattttttggtaatttttggagttttttggtttgtagatttttgtttttatttttatatggtttttttcgtgtgtgtatgtgtgtgtgtgtatttaaattttttttttttataagatagcggtgatattggattaggggtttagtttattttaatatggtttgtttttaattaatgatatgtgtattaattttatttataaatggggttatattttgatgtattgaaaggtaagattttagtatatgaatttggtgggggatatgatttaatttataaatttataatgtttagattttatttttaaaagtttaatgattaatggtaaattggttttggagttcgtgttttatttttattatattttaagaaaaaaattattaagtaaaatagagtattgaatttatttataatttaaatatttattttatgttttttcgtgattttaatttttaattatatttgatgataaaggtttattttatacgtataatttatataagatattttttattttaaatttaattagttaaatttaatttttatagttattttatattgattataggataaaatgatatttgatattttgaatatattagattatttaaatacgtaattaagattaattttatttttttattttttttttagtttttttaatgtgagtattagaaaattttaaatgatgtatgtatattatagttttgttgaatagtgttggatagagtattggttaaaatggtaggttttgaaattacgttattttggttttattttagtttttattaatagttatatgatattgaggaaattaaattttttaaaatttaattagttaatttataaaatggagataatatagatattatatgtttatgaatttggtagagatataaatatttagattgtagtaattaggagagaagaaagatgatatgatatggaagaagagtatgaaaagagatgtagatattttaagattagaggatgtaatgggatggggtagataaagtgtgatagaatttatgttatgaattgttatgattttagtaaattagaagaatgaggaatattgggatgtaattatagagatttaaaaaaaaaagattttggatttggtattgtaggagatgaggtattataggaaacgagataaagatgatgagattaagattgtttagaaggagttagtttaagtttatattttaaagttttgttgattagtgttttttttagatttttgggattttttagttgaggtggaagattttttgaatttaggtttaatgtgtgagtttttttggggtaggggttagaggtggggggattgtttatttaggggtttagaggagtttagtttagttttagtattttgggatgtttttagtatttatatgttaaatattgtaatatattatttatatatattattttatttattttttattataattatatgatattattattagatttattttatagattaggtgattgtattttagagagtttaatttttttagtgttatatatttgttagtgtaagagttaggataaaattaaagtagtgtgattttagagtttgttattttaattattgttttatttagtattgtttaatggaattataagttatatttattattttaaattttttagtagttatattaaatagattttttaaaaggttagttttaataatatattttatgtaatttagtgtatttaaataggataaaattattttattttataattaatgtaaaaaattgatatgatttttattaatgttgagttggaaattgagtgtgtattagtatattttaatttggattatttacgtttttagtgttttagtgtttagtaagttatatatgattgatggttattatattggatagtgtagatttgttttttagatcgaggtaattttgaagttttggaaaagtgtagaggtgttttttgtttgtgatagtattaatttgtgtgaatgttatgatgatggagtagtttatagtttattgtttttttgtttgattgggataggaaagttttttagttgttgagaataataaaaataattattgaaaggtagttgtttatagttgtttttttgagaattgggtattttaaaattaaattaaatatatagattaattagagggtagttagtatttaaaaagaatttttagtatttttttatataatgattttttattataatattttatattttataaggttttattatttgtagaataatattttatatatttttttttatttgattttttatagtaaattagtgaggtattagttttatttttatagatgatgaattgatttatggagggatttgagtgatttgttttatttttatagatgataaattgatttatggagggattttagtgatttgttgagtttatgtgtaataaaggtgaatttttaatatttattttataggttttggtttgttatattttttttattgtgttaattatttttgttttttatatagtaaaatatattgtatttatgaattgtgattagttaatatttttagaatttaatatgtcggtttttttttagaagtgtattttttaaatttttgtgtaattgttatagtgtttgtattttattttttatttaattattgagtttttttttatatgtttttgttttatgttgtttgagaaataattttaaattgatgattttttgttgtgtttgttttcggtgttgttattttatttgtatttagattgtataggattaaattattataggagtatgtaattagttatgggaaataaagtattttgagtttatttttagtttttattttttttggtttaataaaattttgattttgtagaggaattgtatgttgttaagtttgtgtttatttttttgtaattttttttgaaattaggtaataagatgtaaaaagtatttttttttttgtatgttttatagatggaatttttataggacgtttttggatttttcgtttgtttgaataaaggatttttagttattaatagagattttggatttgtaggttggatttataaaggattttaaatgttaatttagagatttgagttttatattattggttttgaggagttatatgattaaaataatgtcgtaggtagaataatatagaggatagttatttgatatgtttggtatgagattagtttagattaatagtaattttaattttaaaggagtttagtgattgaaaaagatattataatttattagaatgtatggatgattaatgatgtttaaatgagattgttggtaaggtatataattgattgttattatttattttttaaagttatattattatttggttatttttagttaatattatatttattatagtataattgtttttattattatttagttattattatagtatttgtttttaagaaatttttttagaatatgtatgttttgattttagtatttgtgagttttcggtgatttattgtaatgagtttggattaagatgtagttggtatagatatttaaggaaatatatttgaaataaaaattttaaaagtatttgggtttagttatttatttagtttttagttttttaaatgtttataataataagtataatgttttatttatagtatttattttttatggtttagcggtttaaatgtaattttatatgtaaagtgtttagtatattatatatttaatgtagtagttgttgtttttattgtaattattattttaataaacggtagtatagattgggtgattaaaggtgaagagttattgaggttaattaggaaattatattgggaattaaatgtgagaaatattgagaaaagaattgataggatttaggagttgattagatttgagttagggtgaatggataatttttgtaggaaagttgtgggtttagggtagggattggtaattatattcggagtttgagttagtgattattttagtaggtagttggaaatatagagttcgagtttgtaagaaaagttagaatataattagttatataaaattttggaagaaattagaaaaaaagtaatttttttttttaatgttattgtggattttttttttttaggtgtttgtggtagaatattgtggattttttgaatttatttttggttatttttatttataggtatttatatgtatttatatattaggtattaatagaggaattgttgaaggatttgttttagttttgttttttaataattggatgattttggataagttttttaatttttttatgttttagtagttttataaaattgaggtgataatggtatttatttttatagggtaataataagaaatagaagatttatggttgggcgtggtggtttacgtttgtaattttagtattttgggaggttaaggtaggcggattagttggggttaggagtttgagattagtttgattaatttggtaaaattttatttttattaaaaatgtaaaaattagttaggtgttttggtgggtatttgtaattttagttattttggaggttggggtaggggtggttgaatttgggaggtagaggttgtagtgagtcgagattacgttattgtattttagtttgggtgatagcgagattttatttttaaaaaaaaaaaaagaagaaatagaagatttaatattgtatgtgttaatagttgagcgtagtatatagtaagttttagtgaagatgatttatttttatttgttattattattgttatttgttttgttggttaggaatgtttaataatttttataagttgtatttttattttt

SEQ ID NO: 58 - DNA, 13131 bp, Artificial Sequence
  chemically treated genomic DNA (Homo sapiens)
  unsure (10848, 11413, 11540, 11554): n is a or g or c or t
gaagataaaaatgtaatttgtaagaattgttaagtatttttgattaataggataaatggtaataataatgatagatgaaaatagattatttttattgagatttattgtatgttacgtttaattgttagtatatataatattaagttttttattttttttttttttttttttggagatgaaatttcgttgttatttaggttggagtgtagtggcgtgatttcgatttattgtaatttttgttttttaggtttagttatttttgttttagtttttagagtagttgggattataggtgtttattaggatatttggttaatttttatatttttagtagaaatggggttttgttaagttggttaggttggttttaaatttttgattttaattgattcgtttgttttggttttttaaagtattgagattataggcgtgagttattacgtttagttataagttttttattttttattattattttatgaaaataggtgttattattattttaattttataaaattattaaggtataaagaaattagaaaatttgtttaaggttatttagttattaagaggtagagttaaggtaagttttttaataatttttttattgatatttaatatatgaatatatataaatgtttatgaataaaaataattaaaaatgggtttaaaaaatttataatattttgttataagtatttaaaaaaaaaaagtttataataatattagaggaagaaattgttttttttttaattttttttaggattttgtgtgattaattatattttgattttttttgtaaattcgaattttgtatttttaattgtttgttgaaataattattagtttaaatttcgggtataattattaatttttattttaaatttataatttttttataggaattatttatttattttgatttaaatttaattaatttttaaattttattaattttttttttagtattttttatatttagtttttaatataattttttaattagttttaatgattttttatttttggttatttagtttatattgtcgtttattaaaatgatgattataataagaatagtaattattatattaaatatatagtatgttaaatattttatatataggattgtatttaaatcgttaaattatagaaagtaggtattatgaataaaatattatatttattattatggatatttaagaggttgaaagttgagtaagtaattgggtttaggtatttttgagatttttattttaaatatatttttttaaatgtttgtgttaattatattttggtttaaatttattatagtagattatcgaaagtttatagatattggaattaagatatgtatgttttaaaaagattttttaaaaataaatgttatggtaataattgaataatgataagaataattgtgttataatgagtgtaatgttggttgagaatgattaagtgataatataattttgggaagtggataatgataattagttatgtgttttattaatagttttatttaaatattattagttatttatatattttgatgaattataatgttttttttaattattgagtttttttagagttaggattattgttaatttgaattggttttatattagatatgttagataattattttttatattattttgtttacgatattattttaattatgtggttttttaaagttaataatataaagtttaaatttttaagttggtatttgaggttttttatagatttaatttgtagatttaaaatttttgttggtaattggaaattttttgtttaaataaacgaaaaatttaaaaacgttttatggaaattttatttgtaaagtatgtagggaggggggtgttttttgtattttattgtttaattttagaaaagattataggaaaataagtataagtttgataatatgtaatttttttgtagaattaagattttattggattaaaaaaaatgggggttgggggtggatttaaggtattttgttttttatgattagttatatgtttttatgatgatttaattttatgtaatttaggtgtaaataaaatagtaatatcgaaaataaatataataaaaagttattagtttaggattattttttaggtagtataagataaagatatgtaaagaaagatttagtaattgagtaggaaatggagtataggtattataataattatataggagtttaaggaatgtatttttgggaagaggtcgatatattgggttttgagagtgttaattgattatagtttataaatatagtatattttgttatatagaaggtaaaggtgattggtataatgaaaaaaatgtaatagattagagtttataaaataggtattgggggtttatttttattatatataaatttagtaaattattgaaatttttttataaattaatttgttatttataaaaatggagtaaattatttaaatttttttataaattaatttattatttgtaaagatggagttaatattttattggtttattgtgaagaattaaataaggaagaatatataaagtgttgttttataaatgataaggttttataaaatgtagagtattataataagagattattatgtaaaggaatgttgagaattttttttaaatattaattattttttaattaatttatatatttgatttagttttggggtatttagtttttaggagagtagttgtgaataattattttttaatagttgtttttgttgtttttaatagttgggaggtttttttgttttaattaagtagggaaatagtggattataggttattttattattataatatttatataaattagtgttgttataagtaaaaggtatttttgtatttttttaaagttttagaattatttcgatttaagggatagatttgtattgtttaatatggtagttattagttatatgtagtttattgaatattagagtattagaaacgtgggtagtttaaattgagatgtgttaatatatatttaatttttaatttagtattaataaaaattatattaattttttatattgattataggatgaaatgattttattttatttggatatattagattatataaaatatattattaaaattaattttttaaaaaatttgtttaatgtgattattagaaaatttaaaatgatagatgtggtttatagttttattgaatagtgttggatagagtagtggttaaaatggtaggttttgaaattatattattttggttttattttagtttttatattaatagatatgtaatattgaggaaattaaattttttaaaatgtaattatttaatttataaaatggatttaataatgatattatatgattgtggtgagaagtaaataaagtagtatatataaataatgtattatagtgtttggtatataagtgttaaaaatattttaggatattgggattaaattgagtttttttaaatttttaaatgaataatttttttatttttaatttttattttaaaggggtttatatattaggtttgggtttaagaagttttttattttagttaggaaattttaaggatttaagaaaaatattgattaataaaattttggggtataaatttagattgattttttttgagtagttttaattttattatttttgtttcgttttttataatattttattttttataatgttaaatttaagattttttttttttaaatttttataattgtattttaatattttttatttttttagtttattaagattatggtaatttatagtatgaattttgttatattttatttattttattttattgtattttttggttttaagatgtttgtatttttttttatattttttttttatgttatgttatttttttttttttttaattgttatagtttgaatatttgtgtttttattaaatttataagtatatgatatttgtattgtttttattttatagattagttgattgagttttagaaagtttaatttttttagtattatatagttgttagtaagagttaggataaaattaaagtagcgtgattttagagtttgttattttaattagtattttatttagtattgtttaatagaattataatgtatatatattatttaaaattttttagtatttatattaaaaaagttaaaaaaaaaataaaaaagtgaagttaattttaattacgtatttggataatttaatatatttaaaatattaaatattattttgttttataattaatgtaagataattgtaaagattaagtttgattggttaagtttgaggtggggagtattttatataaattgtgcgtataaaatagatttttattattaagtgtggttgagaattaaaattacggagggatatgggatgggtgtttaaattgtaagtaagtttaatattttattttatttggtaattttttttttaaaatgtaataaaaataaggtacgagttttaagattagtttattattgattattaagtttttaaaagtaggatttgagtattataagtttatgggttaaattatgttttttattaaatttatatgttaaagttttattttttagtatattagaatgtgattttatttgtaaataggattaatgtatatgttattagttaagaataggttatattgaaatagattgggtttttaatttaatgttatcgttattttataaaaagggaaaatttggatatatatatatatatatatatacgaagaaagttatatgaagatgaaggtagaaatttataagttaaggaattttaaagattgttaaaaaattattagaagttaagagaaaggtatggaatagatttattttttatatttattagaaggaaggagttaattttgttaatagtttgattttggatttttggtttcgagaaatggaagataatgaattttgttgttttaagttatttggtttgtagtattttgttatagtagttttataaaattagtatagtaattaattataattaagttttttgtattagaaagaaataacgtttatttttttttattttgttttttagtattaaatataaagtaaatgtgtttagtatcgattacggatattatataagatagcgcgaattatagcgttcgttaattttaattaagtatattattaagtattgtattttcggacggattatgtatataaattgatgtattattgtttggttttattattaaaaagagtttaacgatatattaattaagtgtagattattttaatatcgttcgtggttagttaattatatttataatattatatattattttgttttatatattaatgtacgatatttgtaacgattaaattatttatattgtttaattaaatttattatatttttgttttgaacggtaaatttttttcgtttttgttgtataatttttgaatgtaggaaattatgtattatgtatttttgggatgttaggtagaataattaaatgttttatttatggtaagttttttattttatgaatattaatgaaggattattaaatataatttattagtattttttttattgaacgtaaatattagaaaaagtattttttttttttttatatatataattttaattggtttttatattattttttagtttatttgtattttatattttttttttggattttagggttttatttttatttattttttaaatattattatttagatgatttgaaggtaatttaaatataatatgttttaaattgattagagaattttttttttttttttttttgagatagagttttaggtttcgtttttgttgtttaggttgaaatgtaatggtataattttcgtttattgtagtttttatttttcgggtttaagcgatttttttgttttagtttttcgagtagttgggattataggtgttcgttattatatttggttaattttttgtatttttagtagagttaaggttttattatgttggttaggttggttttaaatttttgattttaggtgattcgttcgtttcggttttttaaagtgttgggattataggcgtgagttattacgattggtttttaattaattttttttttatattttttgtttgataataaaagtaatagttaatatgagaattttatatatattattttatttaatttttataataattttacgtattttattattttttattattaaataggatttaaaggtatggtaatttgtttaagattataaaattattaagtggtagatgtatattttggtatgtttgattttaaaggttatgtttttaaatattttttatttaagtatataaagtaaaattagaaattttgaagttattttagaaattttattcgttttttatattttgttatttagttattttttttttattatttaaatgttttttaaattagtttttttttttttgtattgtttttattcggttttttttttttgaattattgtaataattatttaattgatattttgattcgaattttaattatttatagggttttttttgtatttaaattttattatgttgttgttttatttaaaatttttataaaggtttttaattgttaattaggttaagtataaattttttaataattggatttttgtttttttttttagttattttatcgttgtttaaatgtgttttagggcgattatattgtatagttcgtttttttttattttttattttttgtgatagggttttattttgttgtttaggttagagtgtagcgattttggtttattgtaatttttgttttttaggtttaagtaatttttttgttttagttttgtaagtagttgggattataggagcgtattattacgttcggttaattttcgtatttttagtagagatagggttttattatgttggttaggttggtttcgaatttttgattttaggtgattcgttcgttttggttttttaaagtgttgggattataggtgtgagttatcgtgtttagttaatttgttttttttaatatggtgatatttattttttttttagtttatatggtttttttttagttgatttttaattatttttttagatttagtttagtattaattttttaagttttttttttttgttgtagtttttttttttttatttgttaatagattaggtatttttttttttgtagtttttttttattttatttttaattaattttattataagttattttattaatatgtgtttttgtttgttgtttttgatttagagttttttgaggataggggttttatattaattatatatcgttagtatagtttttggaatatagtattttatattatatgtgtattaaatggaagggtttatatcgggtttataaattatagtaaagaatgtttgggaatattaggatagttagttttttatatttgttgggagggaaaaggaatatttttgaagaagtgttgatgattcggaaagttagttaaggataataggtgtgtttaaaaaagaagtaaagattagagaatttatagatttttattagagagaatataaagaaattatttatttaaagattagattaaatttaaaataattaggtttataaagttaatagaaatgtaagatatagatatatatagttaatatttttttaagttaattttaaaatgttgaaagttatttcggtaataaaaattataaattttttgtattgttaaggtgagggaaattatattttaaaggcgattttaaaaaaatttaattaagattttttttaggattaatttttggtatttatatttttttagtatgtaatataggtgtttgttttcggcgtacggataaatttagaaggttaagagtaaaaatcgtgattaattttaaagagtttaatttgtattttttgtatgatgttataggatataatattataaatcgttatttatataagatgagttatagttgttatgggttaaatttgttgtttggaaaataaattttaagttttttatttagaagggtttggggaatgggacgtaataaagattaagttagaatatttcggagtttagatttgtttagaaaacgcgttttacgtgtgcgcgttcgtaagttcggtttcgtttttcgtttcgcgtaggcgtttttagttgttttatagcgttcgcgttcggattaggacgagtagaggggacggggttttcgagttatcgaggatataataaatattcgttagttatattatattatttttttgttagcgcgaggtaggtaattattatttattagtcgtaagtagttagcgttttattcgatgcgtaggtttaatttcgtattcgtattcgtatttagtacgtacgcgcgcgggtagagcggttgtagagagcgcggtattgagttcgtttcgttcgggggtaacgtgagattggcgttgttcgtagttaattcgttggtagcgagtttgttcgggaaagttttcgtaagttgcgtagtcgggtttgagggcgtgtattcgcggttgtagtagtcgagttggttttgttgcgagtcggcggtcggagtggggcggcgggtaagtgggtacgaacgcggtggacgttgtatagtcgttttcgtcggtagggaattgttggcggtttaggggtcgttttgagagggaaaagcgggtttcggttgtatttgcggcgttttgcgtggtcgtaagagttaagtggttttagaggttcgttttttacgtaaattttcgttgttttgttagggttttgacgtgacgtgcggtcgcgagaaggaaggggcgggttgggggaggcgttgaggtggtagtagcggcggtttttgttgagttttttttggtttagagcgttcgggttgtcggtttagtaggggggatttttttgagggtcgttgcgggtcgtcgttttcggaggtatcggcgagggtagagtaatagtttttttacggtttgtaaggttattgtttgttagtcgtgggtagcgcggtaaatttgttgggaaaaggttttttggttggaataggatgagtatcgtattagttttgttttttagttgagatgtaaattttaggtttttattttgtggaacgtgggaaaattattttgagtgttggtatgttttaagtatgatataatagtttaatgtatgataaattatgggtgtttagacgaaagatttatatatataaattggaggttttagcggttttagtgtaattaatttttcgtttttttaatttttgatgtttgttttatgggtttttagagcggaaggagtattatatttcggaaatatttgttggaaggggttatgagaaatttttttttgtatgttaatttcgtaatataagcgtttgtgtattttaaaattatagttgttttaaatataatttagtttcgtttttttttttcgtcggatgataggtgttttttaggatagttttattttaagtaatttttagttttaagtaaatattattattaaaagaattgagaattattattaattttttttttggagtttatttttaatggaaaggagaagggaaaattttttttaaaaagaagaaagaaaattgaagtttttgatttgattagagaaatatttagaagattttttatttttatttagtttaattataaaattgagaaataaatattattttttgattatgtaaattttatattatattatgttaatagtatgtattttttatattgagtatttagaaagaagtgatttgaattttgattattttttatggatatattaagttaaatataagagtttgattatttgatatattggttcggtgagttttgttttttttttttaatataaatttattatgttggtaaatttagtttttggttttttattttgtttttatgatataagaaaatgtaggtttttttttttagtttgaatttttttatttagtaaaataatatgttagaaaataaatttttggaaaggtattgtaattatttttttaaatagaattataataataagttttgttttattttaaagttaaatgttgaagattttttattgttgttattagtatttataagtagtatattttggatggtgtttgtgtgttattttaaagtaattaggaaaaaataattttcgtaatataggtattttgttatgttagaattgggggtgttaggttgttagttgtattagtgttgatttattttattattttttatagagtaaatatgaacgttggagttgtttatagtgaagtgaatttaaatattcgtgttatgaatagtcggggtatgtggttgatatatgtattgggagttggtttgttttatattgttttatttagtatttttttttttagtgtttttgttgtttggattttaataaatattatatataatttggtaagaattttatattatattaaatatttaaaagttttaagtttagtggttgtcggaaattaaggggaggaaggaatggaaagttattgtttaatgggtatagagtttttggttttgtaagatgaagagagttttggatgtggatggtaatggtgatgattgtataataatatgaatgtttttaatattatttaattgtatatttaaagttttagtattttgggagggtaaggtaggtagattataaggttaggagtttaagattagtttgggttatatggtgaattttatttttattaaaatataaaaattagcggggtatggtgcgtatgttgtagtttagttattcgggagttgaggtaggagatcgtttgattcgggtgggggtaggtaatgttagtaaaggttnattttttttttggtgttataaaagggggtggagtataatttagattaatttaaaagatttcgattttaaaaggaggaaaaaaataataatttatattatggaaaatgttatataagatataaataaaatattagaaaatcgtaattagagaggtgtttacggttttaaaagatttttggattttgaatttaattcgaaaaaatagaatgaggatatgagggatggtattaaatttttaatatattaatttatttttgtttagataaattttttattataatagcgtaaaaagtatttttaataaatttttttaattaattttgggtaataaataaaagtttgtgtatattaataaaatagaaaataaaggttataaagtgttgaattttttatttgtagggtgatattagtatttaaaatgttttgaattttgaaatattttaaattttagatttttaaattaggtatgtttaatttgtatttgtatgttaaaaggtaaatttaagtgaatttatttgtaggttgttaaaatatggttagtaataagttagagatagaggtaganaatttgttttgtattatatttttatattgttattggaataaggtaagtaagttttaagtgttgttatttttattatatttttaatatatattttggaatttgggtgataagttaatgttgaggtatngtattagtttaaangtatattttatatatagttcgatttatgttttgatggtatttgttgatatgtaaattattttaatttagtatgtatagttgaaatgtataaaggttggtaagttattgttaagtagttaagtgattttttttaaagttattatttattatattagtaataatgttttttttaatgtttattaataattatttaaatgttttgagattgaatatgatgtttattattatttaattgttttagtagagtttaaattattattgattaaatgttgaatatgatatttagttttttattttttttaagattgatatttttttgagtttagagtataatattttataattatttttagaagttgtatatttttagtagttgattagtgaattaattatatttttttaagaatttattataattttaatgttattatagtaatttgtaaaaaaaaaaattatagttttttgaggtaaaagggttaggttagagttttttaattttggtattattgatatttaaggttagataattttttgttgcggggtttgttttatgatttatggtagttgtttttagtttttttgggattagggaatagttttgtgtaagataatttttttatagattaggggtcggggggagtagttttggtatgatttaagtgtattatatttattatgtattttatttttattattgttttgtaatatataatgaaataattatataaattattataatgtagaattagtgggaatttttagttaatttttttgtaattagatggttttatttgggggtgatgggagatagtgataaattattaggtataagatttttagaaggagtatgtaatttaatttattataggttgttcgttttttcgaggggtggtatagaaatttaagttaaatatttaaggtggtaatattatattttgggcgagcggacgatattgtgatggatagagaaaaaaatatttttattaggtgtaatgtttatttttttttttttttttttttttaaaagatgggggttttattatgttttttaggttgtagagtggtggttatttataggtgtaaatataatatattatagttttaaatttttggttttaagtaatttttttgttttagttttttgagtagttgggaataaagatatattttattatgtatggttttgatgtttatttttgattggttaggagttaatagtattaagtattttattgtaaatatatttagtattatttttaggtatatgatagtagagtgattggatttgttaaggtttttagttttatttaagaataatttttaaaaggtttgaggtagagagtagttagaatgttgttgtagtggaaaagggtgttttgtattatagtgttgtagtagagataagttaaagtagatgattttgagagatattttaaaagtagaattataaaatttaagatataagttttatattaggaaagtattgatatttagttaatatgtaataataatattatattgttaaaatattgaatttttaattggtaaattgaattgttgtagttttaagtttattg

SEQ ID NO: 59 - DNA, 8013 bp, Artificial Sequence
  chemically treated genomic DNA (Homo sapiens)
ggttgaaatattttattttagtttggaagtacgtttatggggttaagtaattaattttataaattatttttttgtttttttttttttgttttggagatagggttttattttattgtttaggttggagtgtaggggtgtgattatggtttattgtagttttgattttttgggtttaagtgatttttttgttttagttttttgagtgtttgggattataagtgtgtgttattaagtttggttaatttttaaatttttttgtagagataaagaattgcgttatgttgtttaggttggttttaaatttttgtttttaagttatttttttattttaggttttaaagtgttgggaagatagtcgtgagttattatacgtggttaggttattattttttatttagtttattttatttcgtatttattttagtttatttttgtaaattattttttaagatggtagttggaaagatttaaaaagaaatttaaggttgggcgcgttgattgatgtttataattttagtattttgggaggtcgagaggggtagattatttgaggttaggagttcgagattagtttggttaatatggtgaaatttcgtttttattaaaagtataaaaattagttaggtgtggtgtgggtgtttgtaatattagttatttaggaggttgaggtaggagaatcgtttgaattcgggaggcggaggttgtagtgagtagagattatattattgtattttagtttaggcggtagagtgagattgtttttaaaaaaaaaaaaaaaaaaaaaaaaattagatattgttaatgttttttttttgttaatttgttaggtgtttaggataaaatgttaaatatttaatatggttttatagatattttgtattatttggtttttggttattttattttatttaatttcgttttttgtttgtgttttagttatattgttcgaggagtttttaaattattattttggttttgattatagatttttatatgtgttgttttttttatttgtattatttttttttttttttttgtttgtttaatttttatttattttcgggtttaattagtatttttttattttttttagtttgttgtttttatttaagattaaacgttagagaaatgtgaagtttattgattttcgggtggaatagagtttagtatgttaattaaattattgagtgttggttaggtatagtggttgatatttgtaattttagtattttggaagggcgaggcgggtggattatttgaggttaggagttcgagaggataatatgatgaaattttatttttattgaaatataaaaattagttgggtttggtggggggtatttgtaattttagttattggagaggttaaggtaggagaaaattgtttgaattcgggagatagtggttgtagtgagttgagattgcgatattgtattttagattgggtgatagagtgagattttgttttaaaaataaaaaaaatttcggttaggaatgaagaatgtttgaagtattgtatgtgtaacgtggtttgtgatttttaagttttgagtgtagcgtgatttagtttttcgtgatttgagtaataataaaatgtttaagatttgttttatgttattcgtgttttttaatgttggtttgttgttttttttgttgagattagattgtgatgtggtatattgtttttttttattagttttaatttatatgtatttataaatagtttattttttatgttgtttttatttattttggagatatttgattgtttttttttttttttttttttttgagatagggttttattttgttgtttatgttggagtttagtggtaggattatagtttaatgtagttttgattttttgggtttaagtgatttttttattttagttttttgagtagttggaattataggtatatgttattatatttggttaagttttgtattttttgtaataatggggttttattatgttgtttagattggttttgaatttttaggtttaagtgatttttttgttttggttttttaaagtgttgggattatagacgtgggttattgcgtttggttaagatgttttatggttaattatttgttcgtattgttattattttttagagaaattgttagaagagtgagattatgtgttttttaagtttataaaaatttaaaagaagttaggtagtagatttaaaaataaataaaatagattttgtaaaatttggttttaaatgaaaggtgatattttttaatttggattgtttttttggttttatgggattgtgtagttggagggtgattgggttttgtttttacggtattttttaggtgtagggattattgaattatgtttgttatttttgttttagttttgtattgaaataatagttgtgttattgggttttaaaagaaagtttgttttttttgatttaggtagaaagttattaaagaaaatagaaggataataagtagtgggaaaatagattagaaaagttatcgatttatttattttgtgttagaaatggataggtttgttttttttgttggaaatttaggatgtacgtttgtaatgagaaaagagtgaaagatttgagtaggtatattataaaagtataattatagcggttagtgaatatgaaaaggtttttaagttagagaagtttggagaaatttaaattaaaattattttaggatattacgttatatttattagttttgggtagggtgtaaatattaggaatttttttattttgttggtgagcggtgagcgagcgtataaattagtataattttggaaaataatttaatagagtggaaagttaggcgggtcgttgagttagtagttttatttattagtatatattttatgtttgtttttttgtataagagtatttattgtaggattgtttatagtaagttaaaatggaaaataatttagtgtttttgagtaagtaggatggataagtatatggtggagagttatgtaatagaacggtatagtatagagatgatgaatatttttgatattataataaaatgatttttaaaataatatttacgaaaaagaagttagggttgggatttagtggtttatgtttgtaattttagtattttgggaggttggggttagaggatcgtttgtggttaggagattgagattattttgggtttttataattattttttatgtagagatgtggtaagattttatttttatattaaaaaaaaaaaaatatttagatatattagattatacgttgtatgtttatttatatgaagattattgtttaggggtcgggtacggtggtttatatttgtaattttaatattttgggaggtcgaggcgggtggattttttgaggttaggagttcgagattagtttggttaatatggtgaaatttcgtttttattaaaaatagaaaaattagtcgggtttagtggatagcgtttgtaattttagttatttaggaggttgaggtagagaattgttttaatttgggaggtagaggttgtagtgagttaaaattatattattgtattttagtttgggtgatagagtgagattttatttgaaaaaaataaaaaaaaaaataaaaaattagattatattgtttagggataaatagttgataaaataatagagataagtaagatataattattataaaaattaggatttggggttgggggtggagagggaaggtttaagtggaaagaatggagtggtgataatgtgtgttaatttgggttatggtgattttggggttcgttttgtaattttttaaaatgagtatttatgtgttatttattttttagagggtagaatttttgaattaaaatgtttaagtaattatatattaaaaaaagaaaaaatatggatagatttgtattttaattaaaatatttaaaaaatagagataagggtttcgttatgttgttgagagtggttttaaatttttgggatttaattgattttttcgttttagttttttaaagcgttgagattttaggcgtgaattatcgcgttcgatttggaaagatatatatatatatatatatatatattttttttttttttttttttttttttgagatagagtttagtttttgttgtttaggttcgagtgtaatggttcgattttagtttattgtaaatttcgtttttagggtttaaacgatttttttgttttagtttttcgagtagttgggattataggcgttttattatattcggttaatttttgtatttttagtagagacgaggttttattatgttggttaggttagtttcgaatttttgattttaggtgattcgttcgtttcggttttttaaagtgttgggattataggcgtgagttacggcgttcggtttggataaattttttaaaatataaaagtttgagtgagtttttggtcggtcggtatagatgtcggggtggggtcgtgaatcggttgggacgcgttcgtttcggtttggggggattcgggttagtagtcggtcgtcgcgcgtgcgtattgggcggggggtttcgcgtttttatttgtacgtggttagcgttcggcgttgggtcgtagtttttgtcgtgtacgttggggagtcggtatatgtaggtgggaagttttatacggagaggcgcgtcgttttcgtgatagggttttatttggtatatcggtatggtagaattaaagtaaaagggggtagcgcgtgttaaaggttaacgtttagaaatcgttagaggttacgacggagatcggttattttttttttgattttgttgcgggcgttcgggaaaacgtagttcggtgtgttttgattggtttaggttttttgacgttacgaagtcgatttttgatagagttaataggcgaaaaggagagacgggaagtatttttgtcgtttcgttcggaaagggtggagtataacgtcgaaagtagttaatgggagtttaggaggcggagcgtttgtgggagttttggagggaatttttttagttttcgaggcggatcgggtgttgtatttatggagcgagttgagagttcgaggtgagcggggttcgtagtttttcggtgttttttttcgcgcgttttttttgagatttacggtattttaatttttttggaaatggggggaatatggtcgaggcgcgtggcgaggtagttttttggaggtttcggagtggcgattttagtgttgtagcgatttcgtgttttttgggtgcgttttgaggtcgaggtaagttttttcggggttttgggttgcgggtaaaggattcggttttgtgaggagttgggttcggtttgttttagataggttttgtttatattttattatagggtcgtggatttgaagcgggagcgtgaaatttttatagattgaatgtattttttttttatttgttttttttttttttttatttttatttttatagtattttatttttaatttttttttgtagagacggggatttcgttgcgttgtttaggttggtttcgaacgtttgagtttaagtaattcgttcgttttggttttttaaagtgttggaattaaaggtatgatgtatcgtgtttggtttttttaaaaaattaaggttattttggggacggtagagcgtttagatatatttttatttgtatagttgcgtagtttttaaaaatgtaatacgtttttatttgttaggatgtgtgatttttggttggtaagttatatcgaattttggttagtatatttgtattttatgttagatttgtaaacgtaaatttgttttttgtatttaaatatattagatatatttaggtaattatatttaaatgtattgagatatttaaataaatttggggtttgtgtttaaatgcgttttttttttaaaataaatatttgaagtgggtcgagagcggtgatttacgtttataattttagtattttgggaggttaaggcgggtggattatgaagttaggagtttatgattagtttggttaatatggtgaaattcgtttttattaaaaatataaaaattaattgggtatgatggcgggagtttgtaattttagttattttggaggttgaggtaggagaatcgttggaatttaggaggcggaggttgtagtgagttgagatcgtgttattgtagttcggtttgggtaacgtagtaagattcggttttaaaaaaaaaaaaaaaaaaaaattagaagtggatttgtagtttatagtgtgttgttaaataaatttatttttagagatatttttttttattttttgtgaggttatttgtagttttatatggtagatagatttaggtgagatttttagtaaggtggaatgaagagtaaagaggtttgtttattttagaagggtttattaaaggtttacgatgtgttaaatgttgtaggaaatatttagtgattttttttttatggaggttttttgtttttttttaataagttattaattaaattgtttgttggaaattgttaagttaatgaatatacgggatatattttttgagtagatattgtttgggtagaggaggaagaggagagcggtttagatagagatttgtttatatattgtagtgttttaaagagtttgtgatgtttaggatagttgtttattgtgttataatataggggatggttggttgcggttttttgtaattttagtattttgggaggtcgaggtaggcggattatttgaggttaggagttcgagattagtttggttaatatggtgaaattttattttttttaaaaatataaaaattagttgggtgtgatggtgggcgtttgtaattttagttatttgggaggttgagataggagaatcgtttgaatttgggaggcggaggttgtagtgagttgagtttatgttattgttttttagtataggtaacggggtgagattttgttttaaataataataataataataataataataataataataataataatgtaggggatttgatgaagggaaaggattagagagattttgaaaagaaggtagttttggttttaatgatgattaaattttaatttttatatagtaggaagtggggtattagtaaatttttaagtagaaaaattatttgattagatttgtgattttaaaaatagttttggtgatagagtggaggatgtattggagtagggaataaggggagataaaatttttataaaatttttaaagttagtatagtaagagttttgagggtttttgttaagatagtagttggtagttttagtttggagtggggtattaaaggtaattgtgtataaggaatagttatataattggtatttaatttttgagatgattttgatttaaatattgtgtattttttagtatattgttggtttttttaattatgttgggaaattatgttatttttatttttttttttgttcgttgtttaggttggagtgtaatgtcgtaattttagtttattgtaattttcgttttttggatttaagcgatttttttgttttagttttttgagtagttaggattataggtgtttattattatgtttggttaattttttgtatttttagtaaagacggggttttatcgtgttggttaggttggtgtcgaatttttgattttaagttatttatttatttttgttttttaaagtgttgggattataggtatgagttattatagttagttatgtttttattttttaagaaagaagatattattgttgttaaagattttggtaatttgagagatataatgtatgttttttttatgtggattttagtataattagatagtaaggatttgttgaatttgaagtatttatttagaagtattttgggtatatgtttaaggattgtaaaatagtgtttttatttttggatataataaatgtatttgttaatataataaatgaatagattagatttataaattatttatagtgttgagttattttttatagttaaaattaggatgaaaatatatagttgaatatttgatttgttttttgtaattgatttttttagt

SEQ ID NO: 60 - DNA, 8013 bp, Artificial Sequence
  chemically treated genomic DNA (Homo sapiens)
attagagaaattagttataagaaataaattaagtatttagttatatatttttattttgattttaattgtgggaaatgatttaatattgtaaataatttatgggtttaatttatttatttattatattagtaaatatatttattatatttagaaatagaaatattgttttataatttttaaatatgtatttaaaatatttttggatagatattttaaatttaatagatttttattatttaattatattaagatttatatggagaaaatatatattgtattttttaaattattaaaatttttggtaataatggtgtttttttttttgaaaagtgaaagtatggttggttgtggtggtttatgtttgtaattttagtattttgggaagtagagatgggtggataatttgaggttaggagttcgatattagtttggttaatacggtgaaatttcgtttttattaaaaatataaaaaattagttaggtatggtggtgggtatttgtaattttagttatttaggaggttgaggtaggagaatcgtttaaatttaggaggcggaggttgtagtgagttgagattgcggtattgtattttagtttgggtaacgagtaaaaaaaaaaatgaaagtaatataattttttaatataattagaaaaattaatagtatgttgggaaatatataatgtttaagttaaaattattttagaaattgggtattagttatataattattttttatatatagttgtttttgatattttattttaaattgaagttgttagttgttgttttagtaaagatttttaaagtttttgttgtattagttttaagagttttataaaggttttatttttttttattttttgttttaatatattttttattttattattagagttatttttgaaattataaatttggttaaataatttttttgtttaaaaatttattagtgttttattttttattatatgaaagttaaaatttagttattattggggttaaaattattttttttttagaatttttttaattttttttttttattaagttttttatattattattattattattattattattgttattattgttattatttgagatagagttttatttcgttgtttatgttagagggtaatggtatgagtttagtttattgtaattttcgttttttaggtttaagcgatttttttattttagttttttaagtagttgggattataggcgtttattattatatttagttaatttttgtgtttttagaagagatagggttttattatgttggttaggttggtttcgaatttttgattttaggtgattcgtttgtttcggttttttaaagtgttaggattataggggatcgtaattagttattttttatattgtagtatagtgaataattgttttgaatattataagttttttgagatattatagtgtataagtaggtttttgtttaaatcgttttttttttttttttttgtttaaataatgtttgtttaaagaatgtatttcgtgtgtttattaatttagtaatttttagtaaatagtttaattgataatttgttaagagaaggtaggaaatttttatgaaagagaaattattgggtattttttatagtatttaatatatcgtaggtttttaataaatttttttgaaataaataaatttttttattttttattttattttgttaagaattttatttaagtttgtttattatgtgaaattgtagatgattttatagaaaatggaaagaagtatttttaaaaataagtttatttggtagtatattataggttataggtttatttttgatttttttttttttttttttttgagatcgagttttgttgcgttgtttaggtcggattgtagtggtacgattttagtttattgtaattttcgttttttgggttttagcgatttttttgttttagtttttaaagtagttaggattataggttttcgttattatgtttagttaatttttgtatttttagtagaaacggattttattatgttggttaggttggttatgaatttttgattttatgatttattcgttttggttttttaaagtgttgggattataggcgtgagttatcgttttcggtttattttagatatttattttgaggagggagcgtatttagatatagattttaaatttatttaaatgttttaatatatttaaatgtagttatttaaatatatttaatatatttaaatgtagagagtaaatttgcgtttataaatttgatatggaatgtaaatgtgttagttaagattcggtgtagtttattagttagaaattatatattttaataggtagaaacgtattgtatttttaaaaattgcgtagttatgtaaataaggatgtgtttggacgttttatcgtttttaaaataattttaattttttaaaaaggttaggtacggtgtattatgtttttaattttagtattttgaggggttaaggcgggcggattgtttgagtttaggcgttcgagattagtttgggtaacgtagcgaaattttcgtttttataaaaaaaaattaaaaataaaatattataaaaataaaaataaaaggggagagagaataggtagaaaggaaatgtatttagtttatggggattttacgttttcgttttaagtttacggttttgtgatgggatgtgggtaaggtttgtttgggataggtcgaatttaattttttatagggtcgaattttttgttcgtagtttaggatttcgaaggagtttgtttcggttttaaggcgtatttaaggggtacgagatcgttgtaatattgaggtcgttatttcggggtttttagggggttgtttcgttacgcgtttcggttatgttttttttatttttagggaggttggaatgtcgtgggttttaaagagggcgcgcgagaggggatatcggaagattgcgagtttcgtttatttcgagtttttagttcgttttatggatgtaatattcgattcgtttcggggattgggaaagttttttttagggtttttataggcgtttcgttttttgaatttttattggttgttttcgacgttgtgttttatttttttcgggcggggcggtaaaaatatttttcgtttttttttttcgtttattggttttgttaaaggtcgatttcgtgacgttaaagagtttgggttaattagagtatatcggattgcgttttttcgaacgttcgtagtagggttagaagggaggtggtcggttttcgtcgtgatttttgacggtttttgagcgttggtttttggtacgcgttatttttttttgttttggttttgttatgtcgatgtattaggtaaagttttattacgggggcggcgcgttttttcgtgtggagttttttatttgtatgtatcggttttttaacgtgtacggtaggagttacggtttagcgtcgggcgttggttacgtgtaggtaggagcgcggggtttttcgtttagtgcgtacgcgcggcgatcggttgttggttcgggtttttttaggtcggagcgagcgcgttttaatcggtttacggttttatttcggtatttgtgtcggtcggttagggatttatttagatttttatgttttaaaagatttatttaggtcgggcgtcgtggtttacgtttgtaattttagtattttgggaggtcgaggcgggcggattatttgaggttaggagttcgagattagtttggttaatatggtaaaatttcgtttttattaaaaatatagaaattggtcgggtgtggtgaggcgtttgtaattttagttattcgggaggttgaggtaggagaatcgtttgaattttggaggcggagtttgtagtgagttgagatcgagttattgtattcgagtttgggtaataagagttaaattttattttaaaaaaaaaaaaaaaaaaaaaaaaaatatatatatatatatatgtatgtatttttttaggtcgggcgcggtggtttacgtttggagttttagcgttttgggagattgaggcgggaggattaattgaattttaagagtttgagattatttttagtaatatagcgagatttttgtttttattttttaaatgttttaattaaaatataaatttgtttatattttttttttttttaatatatggttgtttaaatattttggtttagagattttattttttgaaaagtgaatagtatataaatgtttattttgaggaattataaagcgaattttagggttattatggtttaggttgatatatattgttattattttattttttttatttaaattttttttttttatttttaattttaggttttgatttttatggtaattatgttttgtttgtttttattattttgttaattatttatttttaaataatatagtttggttttttgtttttttttttgttttttttagatggagttttattttattatttaggttggagtgtagtggtgtgattttagtttattgtaatttttgttttttaggttgaagtaattttttgttttagttttttgagtagttgagattataggcgttgtttattggattcggttaatttttttatttttggtagagacggggttttattatgttggttaggttgatttcgaatttttgattttaagagatttattcgtttcgattttttaaagtgttgggattataggtgtgagttatcgtgttcggtttttaaataatagtttttatataggtaagtatatagcgtatagtttgatgtgtttgggtgtttttttttttttaatgtagagatgaggttttattatatttttatataaaaggtggttatggagatttaaggtggttttaattttttggttataggcgattttttaattttagttttttaaagtgttgggattataaatatgagttattgggttttagttttggtttttttttcgtagatattattttaggagttattttattgtaatattagaagtatttattatttttgtattatatcgttttattgtatgattttttattatatatttatttattttgtttgtttagggatattggattgttttttattttaatttgttatgaatagttttgtagtgaatatttttatatagaggagtaggtatggggtatgtattaatgaatgggattgttggtttagcggttcgtttggttttttattttattaaattgttttttaaagttatattggtttatgcgttcgtttatcgtttattagtagggtagaagaatttttgatgtttgtattttgtttaaagttggtgggtgtagcgtggtattttaaggtagttttagtttggatttttttagatttttttaatttgaggatttttttatatttattggtcgttgtgattgtgtttttgtaatgtatttgtttaagttttttattttttttttattgtaaacgtatattttaggtttttagtaggagaaataggtttgtttatttttgatataagatgggtgaatcggtaatttttttggtttgtttttttattgtttgttatttttttgttttttttaatggttttttgtttagattaggagggatagatttttttttgaaatttaataatataattgttattttagtatagagttaagatagaaatagtagatatagtttaatggtttttgtatttagagagtgtcgtggaaatagggtttagttattttttaattgtatagttttatgaagttaaaaagataatttaggttggagaatgttattttttatttaaggttaagttttgtagagtttgttttatttgtttttaagtttgttgtttaattttttttgggtttttgtgaatttagaggatatataattttatttttttagtagtttttttaggaggtgataataatgcggataaataattagttataaaatattttggttaggcgtagtggtttacgtttgtaattttagtattttgggagattaaggtaggaggattatttgaatttaggagtttaaaattaatttgggtaatatggtgaaattttattgttataaaaagtataaaatttagttaggtgtggtagtatgtgtttgtagttttagttatttaggaggttgaggtgggaggattatttgagtttaggaggttagggttgtattgagttgtgattttgttattggattttagtatgggtaatagagtaaaattttgttttaaaaaaaaaaaaaagaaaaaaagtaattaagtatttttagggtaaatgaaagtaatatgaagaataagttgtttataaatatatataaattaaaattaatggagaaaaatagtatattatattatagtttagttttagtaaggaaaataataggttaatattagaagatacgaatgatataaaatagattttgaatattttgttattatttagattacgaaggattagattacgttgtatttagggtttaaaaattataagttacgttatatatatagtattttagatattttttatttttgatcgaggttttttttgtttttgagatagagttttattttgttatttagtttggagtgtaatgtcgtaattttagtttattgtagttattgtttttcgggtttaagtaatttttttttgttttagtttttttagtagttgggattataggtgttttttattaagtttagttaatttttgtgttttagtagaaatggagttttattatgttgttttttcgaatttttgattttaagtgatttattcgtttcgtttttttaaagtgttgagattataggtattagttattgtgtttagttagtatttaataatttaattggtatattgaattttgttttattcggaagttagtggattttatatttttttgacgtttgattttaaataagagtagtagattaggagaggtgagaaagtgttgattaagttcgaaggtaaataggagttaagtaaataagagaagaaggaagagtgatgtagatggagggaatagtatatgtgaagatttgtggttagagttagggtggtggtttaggaatttttcggatagtgtggttagagtataggtaaaggacgaaattgggtgaggtaaggtagttagaggttaaatgatataaaatgtttgtgaagttatgttaaatgtttgatattttattttaagtatttagtaggttagtaagggggagatattgataatatttgatttttttttttttttttttttttttggaaatagttttattttgtcgtttaggttggagtgtagtggtgtgatttttgtttattgtaattttcgtttttcgggtttaagcgatttttttgttttagttttttgaatagttggtattataggtatttatattatatttggttaatttttgtatttttagtagagacggggttttattatgttggttaggttggtttcgaatttttgattttaggtgatttgtttttttcggttttttaaagtgttaggattataggtattagttagcgcgtttagttttgagtttttttttaagtttttttagttgttattttaaaggatggtttgtaggggtggattagaatgggtgcgaggtggaataggttaggtgaagaatggtggtttggttacgtgtggtggtttacggttgtttttttagtattttgggatttgaggtgggaggatggtttgaggataggagtttgagattagtttgagtaatatagcgtagttttttgtttttataaaaaaatttaaaaattagttaggtttggtggtatatatttgtagttttaggtatttaggagattaaggtaggaggattatttgagtttaggaagttaaggttgtagtgggttatgattatatttttgtattttagtttgggtaatagagtgagattttgtttttaggataaaaaaaaaaagataagaaaatgatttgtggaattgattatttggttttatggacgtgtttttaagttaaaataaagtgttttaatt

SEQ ID NO: 61 - DNA, 6849 bp, Artificial Sequence
  chemically treated genomic DNA (Homo sapiens)
ttagtttagtttaggaggttgaggttgtagtgattacgttattgtattttattttgggtaatagagtaagattttgttttttgaaaaaaaaaaaagatatttgtttgtattttttaaatatgttttattttttttgtacgtttttttgtttatgggaatgattaaatagaaagtttcgaagtgggttaaggattgtggtttatatttgtaattttagtagtttgggagatcgatgcgggtagattatttgaggtcgggagtttaagattagtttaattaatatggagaaatttttatttttattaaaaatataaaattagttaagtgtggtgatatatgtttgtagttttagttattcgggaggttgaggtaggagaattatttgaatttaggaggcggaggttgtggtaagtcgagattacgttattgtattttagtttgggtaataagagtaaaattcggttttaaaaaaaaaaaaaaaaaaagtttcgaagtggttaatattgttatttaggttgggtatggtgatttatgtttgtaattttagtattttgggaggttaaggtatttgagattagttcgggtaatatggtaaaattttgtttttataaaaaatataaaaaaaaaaaaaatagttgggtatggtggtgtgtatttgtatttttagtttttagggagggcgagatgggagaattatgtgagtttttggagaggtcgaggttgcggtaagttatgattgcgttattgtattttaatttggatgatagagattttgtttaaaaaaatataatatttaaaaaaaaaaaaaatttattatatagattaggtgttataaaatttgggggtttaggttgtggtttttttttttgtatttttgcgatgtaaattaatttattattttaaaatgagatgtgattaattttgtttagagatagaagttattggttaaagggatttagagtaaattagttatagttattagaggatttatagagggagttaatagagtcgggttgggttgtagagcgatttttttatagtacgttgtaatttaatatagtgtgttaagttaggggatttataggggagatatagattgggaaaggttgggtttggtaagtaggagaattggtttaaatgatttattatataaggagagaatgaggtaggtaattagaagttagtatttttaattaaggagattaaagaattagtgggattattttgtttagtgggaaggtgatttggataaatattaaagacggggatatttgtttgtagttgggtttttttgtttttagtgatagaatgttaaagtgagtttgttttatttaaagtataggtcgggcgtaatgatttatgtttgtaattttagtattttaggaggtttaagtaggtggattatttgagtttaagaatttaagattagtttgggtaatatgaagaaattttatttttataaaaaatataaaaaattagttgggtgtggtggtatatgtttgtagttatagttatttgggagattgaggtaggaggattgtttgagttcgggaggtagaggttgtagtgagttatgatggtgttattgtatattttagtttgggcgatagagttagatattgttttaaaaaaaaaaaaaaaattattttgaattgttttttaaaagttttattaggttgggtatagtggtttatgtttgtaattttagtattttgggaggttaaggcggaggattattcgaggttaggagttcgagatcggtttggttaacgtggtgaaattttatttttattaaaaatataaaaattagttgggtgtggcgatatgcgtttgtaattttagttattcgggaagttgaggtacgagaatcgtttgaatttgggaggtagaggttgtagcgagttaagattacgttattgtattttaatttgggtaatagagtaagttttttttttaaaaaaataaaaaataaaaggtttatttaattgtgtagataagggaaagcggttgattggttttaggtaaaggggtgatatgatgagatttgtattttgaaaagattattttggttgtagtatggaggatagagtggcgtggagttggagtagataggggaaatcgataaggaagttattgttatagtttaggtaaagggtgatggtatgtgagataggatagtagtaggagagataggagaaatggtaggttagagagatatatggtaggtaaaatggatatggatagataggagttgggttatatagaagggggttagggaaggagtttttagggaggggttttgggtttttggattgtgaaattagtggtgttatttatttggaagaaggttaggtttagtatagatattatgatattatgttttgagttgaattgtttttttttttttttttttgagatagaatttatattttgttgtttaggttggagtatagtggtataattttagtttattgtaatttttatttttagggtttaagtaatttttttgttttagttttttaaggagttgggattataagcgttcgatattatattcggttaattttttgtatttttagtagagattaggttttattatgttggttaggttggtttcgaatttttgattttaagtgatcgttttattttagttttttaaagtgttgggattataggcgtgagttacggtattcggtttgaattgtttttttttttttaaaaaaaaaaagttcgggataggagattttgcgttgttatataggtcggagtgtagtggtttagttataatttattgtagtttttagattttggttttaagtaattattttgtttttgttttttaaagtgttggaattataggtgtgagttattatatttggttttagttgagttgtttttgaaatatttttatgaagatgtaaagtttaatttagagaagttagaggttatgggaattgaatcgtatttaaagttataatagaaggaaagagtataagaaaagaaaagggtttataatggagttttgaggattttttttatttaaaataattgaggttaggtacggtggtttacgtttgtaattttagtatttcggaaggtcgaggtaggtggattatttgaggttaggagtttaagattagtttaatatggagaaattattttatttttttattaaaaatataaaattagtcgggcgtggtggcgtatgtttgtaatattagttattcggaaggttgaggtaggagaattgtttgaattcgggaggtagaggttgttatgagttaagaacgcgttattgtattttaatttgggtaataagaacgaaattttgttttaaaataaataaataaataaataaataaataaaataattaattttaggatgggtgtagtggtttacgtttgtaattttagtattttgggaggtcgaggtgggcggattatttgaggttaggagtttaagattagtttggttaatatggcgaaatttcgtttttattaaaaatataaaaattagttgggcgtggtggtgggcgtttgtaattttagttattcgggaggttgagatagaagaagaattgttttaatttaggcggtggaggttgtagtgaattgagatcgcgttattgtattttagtttgggtgagagagtgagattttatattaaaaaaatgataataataaaaataaataaataaaaaataaaataattaagtttaatgtatttttattatagttagttttttagtttatttgtattgttttaatagtatttgagatttggtaatttaaaaagaatagtagttggtcgggtatagtggtttatatttataattttagtattttgggaggtttaggtgagtggattatttgagtttaggagtttaagattattttgggtaatatagggagattttatttttataaaaaataataataataaatagttaggtgtggtggtgtatatttgtagttttagtaatatgggaggttgaggtgagtggatttaggtatagtatttaaatatttttgataatgagtgttgataaagaaaaattgagtaaaagtggaattcgagagaattcgaatttagtttagttaaattttgtatttttagtagagatagggttttattatgttggttaggatggtttttattttttgatttcgtaattcgttcgtttcggttttttaaagtgttgggattataggcgtgagttatcgcgttcggttataagtttttttttttttttgttttttggaaagtatcgttgggtatttattttgttttagtatttgagtgaaattttttttagtattttagcgtagtgattaagagatatttttttttttttttttttttatgggaaattcggttttaatttagaggatttgggttttaggatttagtaaggtagttttggattaaaagggagtaaagataaacgtgaagtttagttcggtgtttagggttgttaaagtttatagtttggagttttttattttttaggcggggtagagatatttaaaatcgtttttaaatttgtgaggcgtataggtttatgggaaatagagtttagtatttgttcggagattagtagtgggttttgggaggcggattttcggtgtatttttgcgcgtgtgtatttttttcggcgtgcgtgttcgggtatgcgcgttgtcgtcgtattgttttcgttttttgtgagtttttaggtcgtcgtttgttttcgtttttagggtttggtttgtagtggacgagtatcgtatagtttgcggggttggatgttgatcgttcgggttagtatttaggcggacgcggagttgtgtagattagggttcgcgcgggtcgggtggaggtttaagcggggatttcggagcgtgagtttcggagtcggcggcgttggggttagaggggtcgggagggagtcggttgaggtggcggcggaggcgaagtggcggcggaggcgaaggggcggcgggattcgggtttggttcgtatgtgtttttggcggtttagattaggtcgtcgttgtatggtgagttttagggaggcggatttgggtttttagaaggatattcgtttggatttgtttcgtaggttcggttcgggtttttcgggagtagaatagttttggtgaggtggataggaggggatttcgcgagtagacgcgcgcgttagcgatagtagtttcgtttcggtttttcgggagtcggggggtagaggttgcggagttttaggagggtaagtttgggattttcgggtttagagcgagaagggtttgggtgaagttatcgtgtgttggggatttttgagtgtggggtagggggagggtttcgatcgtttgtaggagagacgtgtgtttgggttcgagggtagggttcggttgtacggaataggcgttgtatgggaagatttgggaggacgaggtttacgggggcgtggagggtgttattatttttagttgcggacgtcgtttttatttttcgttaatttttaatagtttttttttttttttttcgtgttttagatttcgatcgtttttaaacgttttttagtatttttgtttttttatttaagtgtttgttgattcgttttttagatttgttttgggagaatcgtagtaatgtaggaatagtttgtagggatttttttttgttgttttagttgttaggggaagagattgggttttagtaggtgggtgatttgattaggttattggttttgtggatggaattatttatagtagaatttaggagttttattttttaggttagtgttttttttttcgtattttagtttttttaatagaagattattaggtgtagtaataattaagtttagttagataatttagaaataaaattatattttatatatatttattttatttttgagagtttatatatttaatttttatggtttttttgattttaagtagtttagagagataataagaaaacgcgggtcggatgtagtggtttatatttgtaattttagtattttgcgggtttagagtaggagtattttttgagattaggagttagagattagtttaggtaatatagggagattttgattttataaaaaatataaaagtagttaggtatgttgggatgtatttgtggttttaattatttaggaggttgaagtgggaggatggatggagtttaggagggtcgaggttgtagagagtcgtgaatgtattattgtattttagtttgggtggtagattgagattttgttttagtaaataaattataaaaattatgagttgtataatgggaaatttttttttttttgtacgttgtatttgatggtagattatgttatttatgagagttttaatttatttaattattatttgattattttagagttataaagttatacgtgtatgttttttttattattttttttttttttttttttttttttttgagatagtattttttatttagtttggagtgtaatagcgtggttttcgtttattgtaatttttattttttagatttaaatgatttttgtgttttagttttttgagtagttgggattataggtatgtgatattatgtttggttaatttttttgttatttttaagtagagacggggttttgttatgttggttcgaggtaggtggattatttgaggttagaattcgagattagtttggttaatgtggtgaaattttgtattatttttttaggtttttttgagtgtttgtagttgagtgtttatagggtgttaatttatttgagtttttttttgtggttcgtaatgtaggagatttttgtttttgtaggtcggagtttttatgattttagtgatttgtttttgtttttttagg

SEQ ID NO: 62 - DNA, 6849 bp, Artificial Sequence
  chemically treated genomic DNA (Homo sapiens)
tttagaggggtagaagtaggttattgaagttatgagggtttcggtttgtaaaggtagaaattttttgtattacgaattataaaagaaagtttaaataggttaatattttgtgaatatttagttgtaaatatttagaagggtttaaaagagtgatatagggttttattatattggttaggttggtttcgaattttggttttaagtgatttatttgtttcgggttaatatggtaaaatttcgtttttatttaaaaatagtaaaaaaattagttaggtatagtgttatatgtttgtagttttagttatttaggaggttgaggtataagaattatttgaatttgggaggtggaggttgtagtgagcggagattacgttgttgtattttagattgggtgagagatattgttttaaaaaaaaaaaaaaaaaaaaaaaaaaagtgataggggaagtatgtacgtgtaattttgtaattttaagataattagatagtaattaggtgagttaagatttttatgggtaatatggtttgttattaagtataacgtgtaaaaagaaaaaaattttttattatatagtttatgatttttgtggtttgtttgttgagatagggttttaatttgttatttaggttggagtgtagtggtgtatttacggttttttgtagtttcgatttttttgggttttatttatttttttattttagttttttgagtagttaggattataggtgtattttagtatgtttggttgtttttatattttttgtagagttagggtttttttatgttgtttaggttggtttttaatttttggttttaagggatatttttgttttaggttcgtaaagtgttgggattataggtatgagttattgtattcggttcgcgtttttttattgtttttttaaattgtttaaaattaaagaagttataggaattgaatatgtgagtttttagaaatgaaatgaatgtgtataaaatatggttttgtttttaaattatttaattgaatttggttattgttgtatttaataattttttattaagaaaattaggatacgggagaaagagtattggtttgggagataagatttttgagttttattatgagtaattttatttataaagttagtgatttggttaagttatttatttgttaaggtttagtttttttttttagtaattgaggtagtaggagagaatttttgtaggttgtttttgtattattacgatttttttagggtagatttaaggggcgaattagtagatatttaaatgagagaatagaggtgttgagggacgtttagaggcggtcgaaatttggagtacggagaggaggaggaagggttgttaggggttagcggggagtggagacgacgttcgtagttgagggtggtgatattttttacgttttcgtaagtttcgtttttttagatttttttatgtagcgtttgtttcgtgtagtcggattttgttttcgaatttaaatatacgttttttttgtaagcgatcgggattttttttttgttttatatttaaaggtttttaatatacggtgattttatttaggtttttttcgttttgggttcgaaaattttagatttatttttttggggtttcgtagtttttgtttttcggttttcgagaggtcggggcggggttgttgtcgttggcgcgcgcgtttgttcgcgaggtttttttttgtttattttattaaggttgttttgttttcgaggggttcgggtcgggtttacggggtaaatttaggcgggtgtttttttgggggtttagattcgtttttttggggtttattatatagcgacggtttagtttaggtcgttaaggatatatacgggttaggttcgggtttcgtcgttttttcgttttcgtcgttatttcgttttcgtcgttattttagtcgattttttttcggtttttttggttttagcgtcgtcgatttcggggtttacgtttcggggttttcgtttgagtttttattcggttcgcgcgaattttggtttgtatagtttcgcgttcgtttaggtgttggttcgggcggttagtatttagtttcgtaggttatgcgatgttcgtttattgtaggttaaattttaggaacgagagtaagcggcgatttgaagatttataggaagcgagggtagtgcggcggtagcgcgtatgttcgaatacgtacgtcgggagaggtgtatacgcgtaggagtgtatcggaagttcgttttttagggtttattgttggttttcggataagtattggattttattttttatgagtttatgcgttttataagtttaggggcggttttaaatgtttttatttcgtttagaggataagaaattttaggttatgagttttggtagttttgaatatcggattgaattttacgtttgtttttatttttttttagtttagggttgttttattgggttttggagtttaagttttttgggttagaatcgagttttttataaggagaaggaaaggaaagggtgttttttggttattgcgttgaaatgttaagagaagttttatttaaatattaggataggataaatgtttagcgatgttttttaaggaataaaaagaaaaaagaatttgtagtcgggcgcggtggtttacgtttgtaattttagtattttgggaggtcgaggcgggcggattgcgaggttaagagatagagattattttggttaatatgatgaaattttgtttttattaaaaatataaaatttagttgggttaaattcgagttttttcgaattttatttttgtttagtttttttttgttagtatttattgttaggagtgtttaagtgttgtatttggatttatttattttagttttttatgttgttgggattataggtgtgtattattatatttggttatttattattattattttttgtagagatggggtttttttatgttgtttagagtggttttgaatttttggatttaagtgatttatttatttgagttttttaaagtgttgagattataggtgtgagttattgtgttcggttaattattgttttttttaaattattaggttttaggtattgttaaagtagtataaatgaattaagaaattgattgtagtaaaaatatattaaatttggttattttattttttatttatttatttttattattattatttttttgatatggagttttatttttttatttaggttggagtgtagtggcgcgattttagtttattgtaatttttatcgtttgggttgaagtagttttttttttgttttagtttttcgagtagttggggttataggcgtttattattacgtttagttaatttttgtatttttagtagagacggggtttcgttatgttggttaggttggttttgaatttttgattttaggtgattcgtttatttcggttttttaaagtgttgagattataggcgtgagttattgtatttattttaaagttggttattttatttatttatttatttatttatttattttgagatagagtttcgtttttgttgtttaggttggagtgtaatggcgcgtttttggtttatagtaatttttgtttttcgggtttaagtaatttttttgttttagtttttcgagtagttggtattataggtatgcgttattacgttcggttaattttgtatttttagtgggggggtggggtggtttttttatgttaggttggttttgaatttttgattttaggtgatttatttgtttcggtttttcgaagtgttgggattataggcgtgagttatcgtgtttggttttagttattttaaatagagaaaatttttaaggttttattatggatttttttttttttttgtattttttttttttgttatggttttaggtacgatttaatttttatgatttttgatttttttgagttaaattttgtatttttatgggaatgttttaaaggtaatttagttgaggttaggtgtggtagtttatatttataattttagtattttgggaggtagaggtaggatgattgtttgaggttaggatttggaggttgtagtgagttatgattgggttattgtatttcggtttgtgtgatagcgtaaaattttttgtttcggattttttttttttaaaaaaaaaaaggtaatttagatcggatgtcgtggtttacgtttgtgattttagtattttgggaggttgaggtgggacgattatttgaggttaggaattcgaaattagtttggttaatatggtgaaatttggtttttattaaaaatataaaaagttagtcgggtgtggtgtcgggcgtttgtaattttagttttttgggaggttgaggtaggagaattgtttgaattttggaggtggaggttgtagtgagttgagattgtgttattgtattttagtttgggtaatagagtgtagattttgttttaaaaaaaaaaaaaaaaaagtaatttagtttaaaatatagtattataatatttatgttgagtttggtttttttttaggtagatggtattattaattttataatttagaaatttaggatttttttttaaaagttttttttttagtttttttttatgtaatttaatttttgtttgtttatgtttattttatttgttatgtgtttttttggtttgttattttttttgttttttttgttattattttgttttatatgttattattttttgtttggattatgataataatttttttgtcggttttttttgtttattttagttttacgttattttgttttttatattgtaattagaatggtttttttagaatgtaaattttattatgttatttttttgtttaaagttaattaatcgtttttttttgtttgtataattgaatagattttttattttttatttttttgagagggaggtttgttttgttgtttaggttggagtgtagtggcgtgattttggttcgttgtaatttttgttttttaggtttaagcgattttcgtgttttagtttttcgagtagttgggattataggcgtatgtcgttatatttagttaatttttgtatttttagtagagatggggttttattacgttggttaggtcggtttcgaatttttgatttcgagtgatttttcgttttggttttttaaagtgttgggattataggtatgagttattgtgtttagtttagtagagtttttaaaggatagtttaagatggttttttttttttttttgagataatgtttgattttgtcgtttaggttggagtgtgtagtggtattattatagtttattgtaatttttgtttttcgggtttaagtaatttttttgttttagttttttaagtagttgtgattataggtatgtgttattatatttagttagttttttgtattttttgtagagatagggtttttttatgttgtttaggttggttttgaatttttggatttaagtgatttatttgtttgggttttttaaagtgttgggattataggtatgagttattgcgttcggtttatgttttaaatggagtaggtttattttggtattttgttattgggagtagaaaagtttagttgtaggtaagtgttttcgtttttggtatttatttagattatttttttattgagtaaggtgattttattggttttttgatttttttagttagagatgttagtttttgattatttgttttattttttttttatgtgatgagttatttgggttaatttttttgtttattaagtttagttttttttaatttgtgttttttttgtaggttttttggtttaatatattgtattaggttgtagcgtgttgtggaaaggtcgttttgtagtttagttcggttttgttagttttttttgtaaattttttggtagttgtgattggtttgttttgaatttttttgattagtagtttttgtttttgagtagaattggttatattttattttaaggtaataggttaatttgtatcgtaagggtgtagagggaggagttatagtttgaatttttagattttatgatatttgatttatatgataagttttttttttttttaaatattatgtttttttagatagggtttttgttatttaggttggagtgtagtagcgtagttatggtttatcgtagtttcgatttttttaggggtttatatgatttttttatttcgttttttttagaagttgggggtataggtgtatattattatgtttagttattttttttttttttgtattttttatagagatagggttttgttatgttgttcgggttggttttaaatgttttggttttttaaagtgttgggattataggtatgaattattatgtttagtttaaatggtagtgttaattatttcgggattttttttttttttttttttgagatcgagttttgtttttgttgtttagattggaatgtagtggcgtgatttcggtttattataattttcgttttttgggtttaagtgatttttttgttttagtttttcgagtagttgggattatagatatatgttattatatttggttaattttgtatttttagtagagatgggggtttttttatgttggttaggttggttttgaattttcgattttaggtgatttgttcgtatcggttttttaaattgttgggattataggtgtgagttatagtttttggtttatttcgggattttttatttgattatttttatggataggagagcgtatagggaggatggaatatgtttaagaagtgtaaataaatgtttttttttttttttaagagatagggttttgttttgttgtttagggtggagtgtaatggcgtgattattgtagttttaattttttgggttgaattga

SEQ ID NO: 63 - DNA, 5501 bp, Artificial Sequence
  chemically treated genomic DNA (Homo sapiens)
ttaatgggtatagataagaaagtttgttttttttatttgcgttagttttttagatttgttttagttagttattataattttggtggtttaaatgatagaaatttatttttttttagtttcggaggttagaagtttgaaataaaggtgtgaataggattatattttttttgaaggttttagggaggttttatttttggtggcgtttagtttttgttggttttaggtaatttttggtttgtgattgtatttttgtttttgggttatattgttgtcgttttttttgttatatttttgttgtgtattttttataagaatatttgttattggatttagagttaatttgaaaaatttagggtaagtattttgttttaagatgttttatgtaattatagtttgttatatgaggtaatgtttataggttttggagattatgatgtggatatttttttgggggttattatttagtttattatagtttattttttggtattttaaaatttatatttgttttatatgaaaaagatatttattttttttaatattttttaaagttttaatttatatagtatgaattaagattaaatttgtatttatatattagtttagaagttttgtattttattatttaagttagatgtgggtgagatttcgtgtatgatttattttaggattaaatttttttggttgtggatttgtgatattataggttattagtttttaaataattttggaatttggataaataaatttatttaaaatgatgtaataggtatatgatagatgtttttattttgaaagggaaaattggaagggataaagaagttattatttttaattaattttgatttagtagagaaaattttattaggatttaaggtttgtaaataattttttagtttgaagtgtcgtttattgggtttataatagttgtgtagatttttgtgtttgtttatagtagaattatgggtttttttgtatttatggtggttttataggtttttgagtttgtgtttatagtgattttataggtttgtgtttttgtatttattatttttgtttgtttttttggtttttgtttttgtgtttttggttttgtttttggagttatttttgtttttttttgaaggatcgtatgtttgtagtttagtagttttattagtttattttttgttcgtagtagtttggattttaatagtttttttttattttatattgtttttgttatttttaggttaagttgtttttgttgatgtaatatttttaaaaattttgtgggttttttgtgtaatgttatggagtttaatgttattagataagagggttttttataaattttttgggataattttatttttatttttgatttttattgagatggttgaatgagtttaagagttttatgttttattttttcgtgttattatatttagtatattttttttatttttgtaaaagagatggggtttcgttatgttgtttagtttggttttgaatttttgggttcgatttttttgtttttattttttagagtgttgggattataggtggtcgtgtttgatattttagtaaaattgtaatttaagttattaattttattgagtatttacgtggaaataaaaattaagttttttttttcgtggagttggtattgtatattggtgggaggaggagtgagtagggagtgtataatgtgtaattacgtgtgaatatttttagttttttttagtattgtgaaggaaatatataagtaaaaatttgggtttggtttaggaacgtgataagggtgtgattgttaggttgggatttgaatgatgagaagaaggtagttagggaaagaattatataatgaggggataatgttgagtaggtatatgtatgtatgaaatatgggcgtgtgtgtgttttaaataatgagaaaagtggtaagaaatgtagtaggagagtaggtaggaggtggattatataaggttttgtgggttatgaaaaggagtttggatttttttttttttttttttttttttttggagatttatttttgttgtttaggttggagtgtagtggttcgattttggtttattgtaatttttatttttagggtttaatttttttgttttaattttttaagtagttgggattataggcgtttattattacgtttggttaatttttgtatttttagtagaaatggggttttattatgttggttaggttgattttgaatttttgattttaggtgattcgtttgttttagttttttaaagtgttggaattataggtgtgagttattgcgtttcgttaggagtttggattttattttaagtgtagtgggagggtgtataaatagggatatattttgatattatattttaaaaagattattttttgtttggggaatattttataagaggataagagtagaagtaggaagtttattgaggaggttttggtaatagtttaggaggttatgggagtttgatttagggtagtggtagttcgggatgagaggttatttagtttagtatatatttttgagatagaatagataaggtttgttggtagacgggatgtggggtgtgaaaagagtaattaaaaatgatttttatgggtttggtttgatagtagggtggattaaaatgttattaattgagatgggggaaagttaaggagaagttggtggggtaagagttaggagttttttaggatattttatttttgagatgtttattatggattagagttatttagtagatagtttgatgtatgagattggaatttaagggagaggttaagatttgaattatgagtttaggagatttttaagttagatatgttatttaaataggtaaaattggataagttggaaaagttggttagaagattgaagtgtgaagttattttttataaaggttggagagtggaggaggagttgggaattagtgtttaggcgtatatgtgcgtatatatatattttgttgaggattggttagtgaggaaaaaggaagtttagagtatgtggaattttagaagttaattgaagtaagttattttaagaagaattttgtgaagtagattaaatgtcggttgttttaagacgataaggatagataatggattattttttttggtttttttggtattaattttaaaaatatagtatttgtaaaaatgggttaggtgtagtggtttacgtttgtaatttagtattttaataggttaaggcgggtggattatttgaggttaggggtttgagattagtttggttaatatggtgaaattttatttttattaaaaatataaaaattagttgggtatggtggtaggattttgtaattttagttattcgggaggttgaggtaggagaattatttgaattcgggaggtagaggttgtagtgagtcgagatcgtgttattgtattttggtttgcgggataagagtgaaattttgttttaaaataaaaaaatttgtaaaattgattttataattttttatatttgtaatttttaaaatttagaggtaaatatatttttatttaaggaggaataattttttagagtaaaataatttgaatattatttggaatagagattggatagaaaaaagtgtgaatagggaaaattaggataagttatatatgtaaatgagagtataaagagtaaatgagagtggttattgtttattgtagtttaattaattagatagttaagttgtaggtataaagtttttttaatttttattttttaagtaataaattgaggaaaatataaatatgtataaaatttttataaaagttatttataaaagggtaagtagtaatatatagaaaagatttattagattagtaataaattatttttattaggaaaatggtaaatgatatgaataggaaatttaaaaaaagaagaattatagatttttaataagtataatttaagatatatattgatattgtaaggaaatataattattataattttgttaattaaagaaattaatgatatttattggaaaataatgggaatttttaatagattgggttagaagattagaagtgtacgttttaaaatattaatagtttagttgtagggtgagattattgattttaattttttttttttatatatttttttagatttttttatagtaattacgtattattttgtaataaattttaatttttcgatgtataaagtaattgtttggaattgtagttcgatatgaatttaggagttacgtttgtaaaataaattattgttgatgtgatatttttattttttaagtagattgtaaattttttagatgtaggttattatgttataattagggttttattgtttatgatttagatgaaatattttttttttttttgtggtttttttattaatttggtttttatcgtaaaggtagggggattaaaaataaaatattttttgatattggttggtaggtgtattaatacgtgtgcgggaggatttttgttttcggtatggtttacgtcgggtttcggtagcgttttagtacgtaaggggttgtattggagtgtggattgttcggtatttttagagaaagttttgatagtgtgacgttagtgtcgtttttaattacgtataaaacgcgttatgtattgggtagttattatagtgtatatttttgtgtaggaagttattttattagcgtaagtattttagaattaagatcgtattttcgtttttttttttagggaaaggattttagataaatattgagaaaatagatttaatattttaggttaaaattttaggtttttttataggaaggtttttgggttgttattttgaggtgtttatttttttcgcgtcgtgtttacgtttacgagtttacgaatttttcgagttttttttttttatttgtcgagggttcgtttttttagtttcggttcgtttcgtttaggacgcgtgacgttataataagcgtcgtgcgtttcgttttttatcgggggtaattattgtttcgtcggtcgcgtcggagttgggttgtttttgttttcgtttttaagttttggtattttttttaagttgggagagggttttagtttttggttttgaatattttggggttttcgggtgtaggtcgttatgagtaaacggaaggcgtcgtaggagatttttaacgggggaattatcgatatgtttataggttagtatcgggtcgggtttcgttggtttttttttttttttttagtttttttttttgtttttttttttttttatatcgatagtttagtgggtagggtaggttttttgtagcgggtcgtttttcgtggggattttttttcggcgtttttggttggttgttagttttgtcggttatatttgggttatcgtttgggttgtttttggtttggtttttgaaggaaacgggtggttattgttttttagaggttgttatatttttttttagaaaatagttttcgtttgtttattcgtggtttttgtttattcgagttttttgttgttttttaga

SEQ ID NO: 64 - DNA, 5501 bp, Artificial Sequence
  chemically treated genomic DNA (Homo sapiens)
tttgaaaggtaatagaaggttcgggtgaataagaattacgagtaaataaacgagaattgttttttggaaggggatatggtagtttttaagagatagtgattattcgttttttttaagggttagattaaaagtagtttaagcgatggtttaggtgtagtcggtaggattgataattagttaggggcgtcggagggagatttttacggaagacgattcgttgtaaggaatttattttatttattggattgtcggtgtgggagagaaggaaggtaggggaagaggttggaaggaaagaagaaagttagcggggttcggttcggtgttaatttgtgagtatgtcggtgattttttcgttgagagttttttgcggcgtttttcgtttgtttatggcggtttgtattcgagaattttagagtgtttagaattagggattagagtttttttttagtttgaaggaggtattaggatttggagacgggagtaggagtaatttagtttcggcgcgatcggcggaataatggttgttttcgatggggggcggggcgtacggcgtttgttgtgacgttacgcgttttgggcggggcgggtcggggttagaggggcgagttttcggtaggtgaggagagagaattcggagggttcgtggattcgtggacgtggatacggcgcgggggaaataggtattttagaatgatagtttaggggtttttttatgggaagatttggagttttgatttaagatattaaatttgtttttttagtgtttatttggaattttttttttagaaggggaaacgggagtgcgattttgattttgaaatatttgcgttggtggggtagttttttgtataaaaatgtgtattgtaatagttatttaatgtatggcgcgttttgtacgtggttagaggcgatattggcgttatattgttaaaattttttttaaggatatcgggtagtttatattttagtgtagttttttacgtattagggcgttgtcggagttcggcgtgaattatgtcgagaataggaattttttcgtatacgtgttagtatatttgttaattagtgttaaaagatattttatttttaatttttttgtttttgcggtagggattaaattaatgaagagattataagaaagggagaagtgttttatttagattatgagtaatggaattttaattataatatgatgatttatatttgagaaatttatagtttgtttgagaaatggaaatgttatattagtaatagtttattttataagcgtaatttttgggtttatatcgaattgtaattttaggtaattgttttgtgtatcgaaaaattaaaatttattataaaatgatacgtagttgttgtagagaaatttggaaaaatgtataaaaggagaaaattaaaattagtgattttattttatagttgaattattaatattttgggacgtatatttttagttttttaatttagtttattaaaaatttttattattttttaataaatattattagtttttttgattagtaaggttgtggtgattgtgtttttttataatattagtgtatattttaagttatgtttattggaaatttgtaatttttttttttttgaattttttatttatattatttattatttttttaatgggggtagtttgttattaatttggtagattttttttatatattattatttgtttttttatggatagtttttgtaaaaattttgtatatatttgtattttttttaatttattatttgaggaataaaagttaaaaaaattttatgtttgtaatttaattatttgattagttaagttgtagtgagtagtgattatttttatttattttttatatttttatttatatatatgatttgttttagttttttttgtttatatttttttttgtttaatttttattttaggtgatatttagattattttgttttgaagaattatttttttttaaataaaaatgtatttatttttgaattttaaaagttataaatgtagggaattgtgggattagttttataaatttttttgttttgagatagagttttatttttgtttcgtaggttagagtgtaatggtacgatttcggtttattgtaatttttgtttttcgggtttaagtgatttttttgttttagtttttcgagtagttgggattataggattttgttattatgtttagttaatttttgtatttttagtagagatggggttttattatgttggttaggttggttttaaatttttgattttaagtgatttattcgttttggtttattaaagtgttagattataggcgtgagttattgtatttagtttatttttataaatattatatttttaaaattagtgttagagaaattaaggaaaataatttattatttgtttttatcgttttagaataatcgatatttgatttgttttataaagttttttttgaaataatttgttttaattggtttttaagattttatatgttttgggttttttttttttttattggttagtttttagtagggtgtgtgtgtgcgtatatgtgcgtttgagtattggtttttagttttttttttattttttagtttttatgggaaatggttttatattttagttttttaattagtttttttaatttgtttagttttatttgtttaaatggtatgtttagtttgaaagttttttaaatttatagtttaagttttgattttttttttgagttttagttttatatattaggttgtttattggatagttttagtttataataggtattttaaagataaaatgttttaaagaatttttgatttttgttttattagtttttttttaatttttttttattttagttaatagtattttaatttattttgttattaggttaaatttataagagttatttttaattgttttttttatattttatatttcgtttgttagtagattttgtttgttttgttttaggaatatgtgttgaattggatgattttttatttcgagttgttattgttttagattaaatttttatgattttttgaattgttattaaagtttttttagtgggttttttgtttttgtttttgtttttttatagaatattttttaaatagagggtgatttttttaggatgtagtattaaaatatgtttttatttatatatttttttattgtatttaggataaaatttaagtttttggcggggcgtagtggtttatatttgtaattttagtattttgggaggttgaggtaggcggattatttgaggttaggagtttaaggttagtttggttaatatggtgaaattttatttttattaaaaatataaaaattagttaggcgtggtggtgggcgtttgtaattttagttatttgggaagttgaggtagggaggttgaattttggaggtggaggttgtagtgagttaagatcgggttattgtattttagtttgggtaataagagtgagtttttaaaaaaaaaaaaaaaaaaaaaaaaaaatttaagtttttttttatggtttataaggttttatgtgatttattttttgtttgtttttttattgtattttttgttattttttttattgtttaggatatatatacgtttatattttatatatatatgtgtttgtttagtattgtttttttattgtatggttttttttttggttgttttttttttattatttaggttttagtttggtagttatatttttgttacgtttttggattaggtttaggtttttatttgtgtgttttttttatagtattaagaaggattggaaatatttatacgtggttgtatattatgtattttttgtttatttttttttttattaatgtgtaatgttagttttacgggagaagggatttaatttttgtttttacgtaagtatttaataaagttaataatttaaattgtagttttgttgaagtgttaaatacggttatttgtaattttagtattttgggaggtggaggtaggaggatcgagtttaggagtttaagattagattgggtaatatggcgagattttattttttttataaaaataagaaaaatgtattgggtgtggtggtacgaagagatgaagtatgggatttttggatttatttaattattttagtagaagttaggaatagagatgggattattttagaaaatttgtggaggatttttttgtttaatggtattgaattttatgatattatataggggatttataagatttttgagaatgttatattagtagagatagtttagtttggaagtgatagagatagtgtgaaatgagaaaaggttgttgaaatttaaattgttacgggtaagaaatgggttgatagagttattgggttgtaaatatgcgattttttaagaaaaagtaagaatgattttaagggtagagttaggggtatagaggtagaggttagaggagtagatagaagtgatggatgtagagatataggtttatgaggttattgtgagtatagatttagaggtttatggagttattatgggtatagagaggtttatggttttgttgtgagtagatataaaggtttgtataattgttgtgggtttagtgggcggtattttaagttagggaattatttgtaggttttgaattttaatggaattttttttgttagattaaaattggttgggaatggtgatttttttattttttttaatttttttttttagaatgagaatatttattatatgtttattatattattttaaataaatttatttatttaaattttaaagttatttggaagttgataatttgtagtattataggtttatagttagagaaatttaattttaaaatgaattatgtacggggttttatttatatttgatttagatgatgagatgtaggatttttgagttaatatatagatgtaaatttggttttagtttatgttgtatgagttgagattttgggagatgttgggaggaataaatgttttttttatgtaggataaatatggattttggggtgttagagggtggattgtagtgggttgaatggtggtttttaagaagatgtttatattataatttttagagtttgtgaatattattttatatggtaaattgtgattatatgaaatattttgagataaagtgtttattttggattttttaaattggttttaaatttaatggtaagtatttttgtaagagatatatagtagagatgtgatagagaaagcggtagtaatatgatttaggggtagagatgtagttataagttaaggattgtttaaagttaatagaagttggacgttattagggatagaatttttttagagtttttagaagaggtgtgattttgtttatatttttattttagatttttggttttcggaattgggagagaataagtttttgttatttaagttattaaagttgtggtaattagttagggtaggtttaggaaattaacgtaggtagagagagtaggtttttttgtttgtgtttattgg

SEQ ID NO: 65 - DNA, 6029 bp, Artificial Sequence
  chemically treated genomic DNA (Homo sapiens)
aagtgttgggattataggtatgagttatttggtttggttcgtttttttgaatatatttaatatattcgaggtgggttgattgtttgagtttagaagttcgagattagtttggataatacggtgagattttatttttataaaaaataaaaataataataaatttaaaatttaattttttttttatttgttttaagaatatttgttggtagtatttgtagttgtagtatttatttagagataattttgtcgtgaaatattttgtttttattatttttatattgttttagtattattgattttggaaataaaagatattattttattaatagtattttgtttttagtagtggtatttttatttataaaatatagtaattttgattattaaaattgttaaattttagaaaatgttgaatttttatgtatgatgttaatattattttttgattaatttataattttaattattttaatgattttaatgttagttttgtttagaaataattttaagaggttaggcgtagtggtttttatttgtaattttagtattttgggaggatgaggtgggtgggtcgttttaggttaggagtttaagattagattggttaatatggtgaaattttatttttattaaaaatatataaattagtcgggtatgtgggtaggtatttgtaattttagttatttaggaggttgaggtaggagaatggttcgagtttgggaggtagagggtgtagtgagtcgagattgtattattgtattttagtttgggcgattgagcgggattttattttaaaagaaagaaagagagagaaagagagagagagagagagaaagaaaaagaaagagaaagaaagaaagagagagagagagagaaagaattttaagaatagtttttatattttatttttatattggaaattagttagatttgttttagttttaaagagtatgtttatgtaaaattaaatgattgttggtagcgagttgtattttttttttttaaataggaaaagcgttaaaaaaaaaaaaaaaaaaaaaaagaggttaggcgtggtggtttacgtttgtaattttagtattttgggaggttgaggcgggtggattataaggttaggagatcgagattattttggttaatatggtgaaattttatttttattaaaaaaatataaaaaaaattagtcgggcgtggtggcggatatttgtagttttagttatttaggagattgaggtaggagaatagcgtgaatttaggagacggagtttgtagtaagttaagatcgcgttattgtattttagtttgggcgattgaaaaagatttcgttttaaaaaaaagaaaagaaaagaaaaagaaaatagggatgatgttggtaattatcgtatagagtttttatgagggataaatttataaaatggtatttgatattatggtaaaagttatatataggaatattttattttattgtgttttattttattatgttttaaagatattgtattttttatatattgaagttttgtggtaattttatatatagtgagtttattagtgtaatttttttaatagtatgtgtttgttttatgtttttatgttatattttggtaatttttgtaatattttaaatttttttattattattgtatttgttacggtgattcgtgattagtgatttttgaggtattattgtaattgtttgggggtgtaacgaattgtgtttatataagaagataaatttaattaataaatgttgtgtgtgttttgattgttttgttaatatgttgtttttttttttttttttttttttttaggtttttttattttttaagatataataatattgaaattaagttaattaataattttataatgatttttaagtatttaagtgataaaaagagttttatattttttattttaaattaaaacgtagaaatgattaagtttagtgagaaaggaatgttgaaagttgagatagattaaaatttaggttttttgtattaagtaattagttaagttgtaaatacgaaggaaaagttttgtttttttgagataggttttagtttgttgtttaggttggagtgtagtgttttaattttggtttattgtatttttcgttttttgggtttaggtgatttttttattttagttttttaagtagttggtattataggtttgcgttattatatttggttaatttttgtagtttttgtagagatgaggtttcgttatgttgtttaggttggttttaaatttttggatttaggtaatttttttattttggttttttaaagtgttggtattataggcgtgagttattgtattcggttttaaatttgagatagagtgttattttgttatttaggttggagtgtaatggtacgatattggtttattgtaatttttgtttgtttgatttaagtgatttttttattttagttttttgagtagttgaggttatagatgtatgttattatattttgttaatttttttgggtttttttgtttgtttggtttggtttggtagagatagggttttgttatgttgtttaaattggttttgaattttttgatttaagcgatttgtttattttggttttttaaagagttgggattataggtgtaagttattaggtttggtttggaaaagttttttttcggaaaagtttttgaagaaaattataagtgttattttagggaatatataaatgataggaaggtgaaatagttttattgttgatatggagaaatttttagtgtgttgaatagaagattaaattagttataattttttttaagttaaagttttatttatagtaaggttattttttttaattatatgaaagttgagataggtgagaaagttgtagaagtttgaagttagtagaagttggtttatgaggtttaaggagagaagttatttttataagataaaagtgttagataaggttagaggtagtggtttatataagtaattttagtattttaggaggttaaagtaggtggattatttgaggttaggagtttgagattagtttggttaatatagtgaaattttgtttttattaaaaatataaaagttagttgggtgtggtagtgtatatttgtaattttagttatttgggaggttgaggtatgagaattgtttgagtttgggtgattaaggttgtagtgagttatgattgtgttattgtattttaatttgggcgatatagcgagattttgttttaaaaaaataagtaaaataaaataaaattatgttttttatgtgatatgttatttatgtgattgtttattttagtttataattgttataaggtattattatatagtaagagtgattggtagatttttatattaatagtagatgggttttttttatatttgtaaagttttttatgattttgtaagttttttataatttatatttttttatatttgggtgttttatttgagagattaaatatatgaatagtagttagattatatataaaaatagaattttgatttataatttatagtaatttgttggggaaattaatttttttatttataataaatagtataggaagtaagtttgttataagttagatttgtataaagttaaattgttatttttaatgatgattttggaggttaaataataatttttgtagtaatgggtttaaatgttttaattagtattttatagtttttttaatagtttttaatataggtttaattaaagaaagttaaatatttatttttaaattaattatatatcgtattttattattagttagtttaggtatagtttttttatgttaatagtttttaattaaagaatattttgacggttttttttttttataaagtttttttatttttttgtttgtttttgagttttgttaaatgtaagtgatgatggttgatttttttgttatagtaagttttgaataaatagtttatgttttttttatttggttatttatttttatatattggatttagtaatttatgaaattttatgaagaattaatttttaaaatttttttttttttagatacggtttttttttgttgtttagattggagtgtagtggtattattatggtttataatagtttggattttttaagttcgagagattgattgttttttttttttatttttcgttttttattttttagtttttagggtagttgggattttatcgtatttgtttataaacgtttttaaaagatattggtgtcggttaggcgtggtggtttatatttgtaattttagtattttgggaggttgaggcgggcggattacgaggtcgggagatcgagattattttggttaatacgatgaaatttcgtttttattaaaaataaaaaaataaaaaaataaaaaaaaattagtcgggcgtggtggttggcgtttgtagttttagttattagggaggttgaggtaggagaatggcgtgaattcgggaggcggagtttgtagtgagtcgagatcgcgttattgtattttagtttgggtaatagagcgagattttgttttaaaaaaaaaaaaaaaaagatattggtgttatttttaaaatatttaaaaagtttacgtggagtattttttttattttattttaataatttaaattaatatgttataggttttatattttcggagaagattttttttttggaatggacgcggttttttgtttataagagcggtggttttagtgttcgaacgcgtgggtagatcgtaaattgttgcgtttttcgtagttttcgcgcgtattaagtgggaattataattttcggcggtttcggcggattgcgggtcgtcgggttagatagtcgatttcggttataagcgtttgcgtagtcgcggggtcgtcggtcgtgttgttttcgttaatttttgtggtaatttttatcgtggcgagtttcgcgtttaatggagacgtttgattttatcgagttgttcgagttgtttaaattttattatcggaggttttttttttatttttagtattatcgttggtttaattacggtggaggtgatggaggcgaggaatgggttcgggaacggagtgtgaggaggttggaggcggggtgtttttagaatgataatatgaagcgttttttgtgtattaggttttgtgtcgcgcgtttttatttgttttttcgagttcgttttattattttataggtgtaaatgggtcgagagaggatataataagttagtttgcggttacgttgtaaaaaaaaaaaaaaaaaaaaaaaaaatagagtcgtcgtttttatttttgcgtggttaggtttatattaggtgtttcgtttatttgtagcggtgtttagggggttattggggcgtagcgtgaagttgttgaggtatggtttgtattaggagcggaagagttttttttagaggaagagaaatatttttttttttgtagttgaatttattagtgcgaatcgaggagagaggggtggtattatatatttaaaatatttatgtatttgttttattttttgtatcgttttttagtaaatacggaatggtaattgtttttaaattagggattaggttatgtggattttgttttgttttttttttatatttattacggtgttgagtatagggggtttattaaaaatattttttcgggtcgagtgtcgtggtttacgtttataattttagtattttggaaagtcgaggaggacggattatttgaggttaggaattcgagattagtttggttaatatggtgaaatttcgtttttataaaaaatataaaaattatttgggtatggtgggtcgtatgtttgtagttttagttatagtttcgggaggttgaggtggtaggattttttgaattcgggaggcggaggttgtagtgagtttttatcgagttattgtattttagtttgggcgatagagtaggaagtaagtaagatttttttatcgaaaaaaaaaattttttattggttaaaattataatgttttgagttaaataaagtagtaaattaattttaaaatgtatatttattttgtagt

SEQ ID NO: 66 - DNA, 6029 bp, Artificial Sequence
  chemically treated genomic DNA (Homo sapiens)
attgtaaaataaatgtatattttaaagttaatttgttattttatttggtttagggtattataattttagttaatgagaagttttttttttcggtgagggaattttgtttgttttttgttttgtcgtttagattggagtgtagtggttcgataaaggtttattgtaattttcgtttttcgggtttaagggattttattattttagtttttcgaggttgtagttgggattataggtatgcgatttattatgtttagataatttttgtattttttgtagaaacggggttttattatgttggttaggttggtttcgaatttttgattttaggtaattcgtttttttcggttttttaaagtgttgggattataggcgtaagttacggtattcggttcgagaagatgtttttaatgagttttttatgtttaatatcgtggtagatgtaaaagaaaaataaaataaaatttatatgatttagtttttaatttgaaagtagttattatttcgtatttgttagggaacggtataaaagatgaaatagatgtataaatattttaaatatgtaatgttattttttttttttcgattcgtattaataaatttagttgtaaggaagaaagtatttttttttttttgagagaggttttttcgtttttgatgtaaattatgttttagtagttttacgttacgttttagtaattttttgggtatcgttgtaggtaaacggggtatttaatgtgagtttgattacgtagaggtaggagcggcggttttgttttttttttttttttttttttttttatagcgtggtcgtaggttggtttattatattttttttcggtttatttatatttatgaagtggtggggcgggttcgagagagtaaatgaaggcgcgcggtataaagtttggtgtataaaaggcgttttatattgttattttaaggatatttcgtttttaatttttttatatttcgttttcgaatttatttttcgtttttattatttttatcgtagttgagttagcgatagtattgagagtagggaaagagttttcggtaataaagtttaagtagttcgggtagttcggtggggttaaacgtttttattgagcgcggaattcgttacggtaaggattattataggaattggcgggaatagtacggtcggcggtttcgcgattgcgtaggcgtttatggtcgaggtcggttgtttgattcggcggttcgtagttcgtcggggtcgtcgggaattgtagtttttatttggtgcgcgcgggggttgcgggagacgtagtagtttgcgatttgtttacgcgttcgggtattagggttatcgtttttgtgggtagaaggtcgcgtttattttaggaagaggatttttttcggaaatgtgagatttatagtatattgatttaggttattaagatgaagtaaaaaggatgttttacgtgaattttttggatgttttagaaataatattagtatttttttttttttttttttgagatagagtttcgttttgttgtttaggttggagtgtagtggcgcgatttcggtttattgtaagtttcgtttttcgggtttacgttatttttttgttttagtttttttagtagttgggattataggcgttagttattacgttcggttaatttttttttatttttttatttttttatttttagtagagacggggttttatcgtgttagttaggatggtttcgatttttcgatttcgtgattcgttcgttttagttttttaaagtgttgggattataggtgtgagttattacgtttggtcgatattagtattttttaaaaacgtttgtaggtaggtgcggtggagttttagttattttagaggttgaagggtagggggcggggagtggggggagggggtaattaatttttcgagtttgggaggtttaggttgttgtgagttatgatagtgttattgtattttagtttgggtaatagagaaagatcgtgtttaaaaaaaaaaaagttttggaaattagttttttatggaattttatgaattattagatttaatatgtggaaataaataattaaatgagaaaagtataggttatttatttagagtttattatagtaagggagttagttattattatttgtatttgataggatttaaaggtaggtagaggagtaggaaagttttataaaaaagggaagtcgttaaggtattttttgattggaggttgttggtatggagaagttgtatttgggttaattagtagtaggatgcggtatgtgattggtttaggggtgggtgtttggttttttttggttggatttatgttggaagttgttaaggaagttgtaggatattagttaaggtatttgggtttattgttataggggttgttgtttggtttttaggattattattagagatagtagtttgattttatataagtttgatttgtagtaagtttgttttttgtgttgtttattatagataagggggttggtttttttagtaggttgttgtagattgtgggttagagttttgtttttatatatggtttggttgttgtttatatatttagttttttaaatagaatatttaggtataagaaaatatgaattataggaagtttgtagaattatggagagttttataagtatgaagggaatttatttgttattgatgtggagatttgttaattatttttattgtgtaatgatattttatggtaattgtgggttagagtgggtagttatatgaataatatgttatatgaaaaatatagttttattttattttatttatttttttgagatagagtttcgttgtgtcgtttaggttggaatgtagtggtataattatggtttattgtaattttggttatttaggtttaagtaatttttatgttttagttttttaaatagttaggattataggtgtgtattgttatatttagttaatttttgtatttttagtagagatagggttttattatgttggttaggttggttttaaatttttggttttaagtgatttatttgttttggttttttaaagtgttgggattatttgtgtgagttattatttttagttttgtttagtatttttattttatggagatggtttttttttttaaattttatgaattaatttttgttggttttaaatttttgtagtttttttatttgttttagtttttatataattaaagagagtaattttgttatgggtgaggttttggtttaagggaagttatggttggtttgattttttatttagtatattaaaagtttttttatattagtaataaggttgttttatttttttattatttgtgtgttttttgaagtagtatttgtaattttttttaggaattttttcgggaaggaatttttttaggttaggtttgatagtttatatttgtaattttagttttttgggaggttaaggtgggtagatcgtttgagttagggagtttaagattagtttgggtaatatggtaaaattttgtttttattaaattaaattaaataaataaaaaagtttagaaaaattaatagggtgtggtggtatgtatttgtggttttagttgtttaggaggttgaggtgggaggattatttgagttagataggtagaggttgtagtgagttagtatcgtgttattatattttagtttgggtgatagagtaatattttgttttaaatttaaggtcgagtgtagtggtttacgtttgtaatgttagtattttgggaggttaaggtgggaggattgtttgagtttaggagtttgagattagtttgggtaatatagcgagattttatttttataaaaattataaaaattagttaggtgtggtggcgtaggtttgtggtgttagttatttgggaggttggggtgggaggattatttgagtttaggaggcggagggtgtagtgagttaagattagggtattgtattttaatttgggtaatagattgagatttgttttaaaaaaatagaatttttttttcgtatttataatttggttaattgtttggtgtaaggggtttaggttttggtttgttttagtttttaatattttttttttattaagtttaattatttttacgttttgatttaaagtgagagatgtggggttttttttgttatttgaatatttagaggttattgtagggttgttaattggtttagttttaatattgttgtgttttagggaatagggaggtttgaggagagggagagagagaggagaatagtatattggtagaatagttagaatatatataatatttattgattaagtttgtttttttatataggtatagttcgttgtatttttaaataattataatagtattttaaagattattgattacggattatcgtaatagatataataataatgaaaaagtttgaaatattgtaaggattattaaaatgtgatatagagatatgaagtaaatatatgttgttggaaaaattgtattaatagatttattgtatgtagggttgttataaagttttaatgtgtaaaaaatgtaatatttttggagtataataaagtgaagtataataaaatgaggtatttttgtatatagtttttgttatgatgttaggtattattttatgaatttattttttatgagaattttatgcggtagttgttaatattatttttatttttttttttttttttttttttttttttgagacggagttttttttagtcgtttaggttggagtgtagtgacgcgattttggtttattgtaagtttcgttttttgggtttacgttatttttttgttttagttttttgagtggttgggattataggtgttcgttattacgttcggttaattttttttgtatttttttagtagagatggggttttattatgttagttaggatggtttcgattttttgattttgtgatttattcgttttagttttttaaagtgttgggattataggcgtgagttattacgtttagtttttttttttttttttttttttttttaacgttttttttgtttggaaggaaaaagtgtagttcgttgttagtagttatttaattttatataagtatgttttttgaggttgaaataaatttgattgatttttaatgtgaaaataaaatataaaaattgtttttggagtttttttttttttttttttttttttttttttttttttttttttttttttttttttttttttttttttttttttttttttttttttttgaggtagagtttcgtttagtcgtttaggttggaatgtagtggtgtaatttcggtttattgtattttttgttttttaggttcgagttatttttttgttttagttttttgagtagttgggattataggtgtttgtttatatgttcggttaatttgtgtatttttagtagagatggggttttattatgttggttagtttggttttgaatttttgatttgaggcgatttatttattttatttttttaaagtgttgggattataggtgggagttattgcgtttggttttttggagttatttttaaatagaattaatattaaagttattggaataattagaattgtggattaattaaagaatgatgttaatattatatataggaatttagtattttttaggatttgatagttttaatgattagaattattgtattttgtaagtggaagtattattattgaaaatagaatgttgttaatagaatgatgttttttgtttttaaagttagtaatattagagtaatatgaaaataataaaagtaagatattttacggtaaagttatttttggataaatgttgtagttataagtgttgttagtaagtatttttggggtaaatgggaaaagggttaaattttaaatttattgttatttttattttttgtagagatgggattttatcgtgttgtttaggttggtttcgaatttttgggtttaagtaattagtttatttcgggtatattaagtatatttagaggaacgggttaggttaggtggtttatgtttgtaattttagtattt

SEQ ID NO: 67 - DNA, 7695 bp, Artificial Sequence
  chemically treated genomic DNA (Homo sapiens)
ttttttgttttagtttttcgagagtagtcgggattataggcgtgtgttattatgttttggtaatttttttatttttagtaaaggagttttgttatgttggttaggttggttttaaatttttgattttaggtgattcgtttgtttcggttttttgaagtgttgggattataggcgtgagttattgtgttcggttaatagttatattttttatattagaaattttaattaaatttaaaaagtatagggggtttataagtatataggataattgaatttatattattgttaatttataattcgttattttgattattatcgttaattattttttttataattttttaatgaaaataaggttatttttatgtaaggtatttttttttaataaaagtaattttatgaaaaatatattattttttggatttaggttttttatatttttagtttttaatgcgttgaatggttttatttgaatttgatgttttaagattgagttagggtaacggttaaagaagattttattgatagttatgttaaaagttggaataattttttgtaaaaataaatatgaagatgtatttgtatttatattttagtgttaaatataataaaggtatgttagattagtaaagtataaaaagataatatgttatgtttttaaagtattattttatagaattatgtacgtgttgtttttaaatttaggtatgttgaattatttatttttgtatatttttaattgggttaaattttataatttatacgaaagtgtttttttgatgtatattggtatattttttgttttttattagaagggaaaaagattttgattttatattttattttttttttataatgaagtgatattaaagtaagttttttatttatttatttttaatttttgaggtagagttttatttttgttgtttaggttggagtgtaatagtatgattttggtttattgtaatttttgtttttgggatttaagtaatttttttgttttagtttttcgagtagttgggattataggtatttgttattacgtttgattaattttgtatttttaatagagacggggtttttttacgttggttaggttggttttgaatttttaattttaggtgatttgtttgtttcggttttttaaagtgttgggattataggtatgagttatcgtgtttggcgatattaaagtaagttaaattatatttatttaaattttttaatatatggtttttattttatagatgaggaaatagtttttggttggttaaggaatttgattaaggttatgtagttagtaattagtaaaattaagatttaaaaattaagtttgtttgtttttaaagattatatttagagttaatagagttgatattttattaatagaaattgatttgaggtttagaagtaaaagtttatagtataatatatttttttaaagtagtaggaagtatgtaatttatttaaagtatttttatttaagataatttattttatgaaatttaagaagttattagttttaagatttattatttttttatatgaaaaatattgttaagtaaattataatttgttattgatagtaatataagttttatttttaggaatattaaaatgtgaaaaaaaaatgtttattttaaaggagatgatatatagtttttttttgtttgtttgagatggaattttattgttgtttaggttggagagtagtggtgttatttcggtttattgtatttttgttttcggggtttaagtgattttatcgttttagattttcgagtagttgggattataggtatgtattattatgtttggttaatttttgtattttttagtatagatggggttttattttgttgtttaggttggttttaaattttcgattttaagtgatttatttgtttcggcgttttaaagtgttgggattataggtgtgagttattatatcgggttaaaggagatgatatttagttttttaaagtgtttgcgtatattatttttattattgaagaatttttgttatttggaaatattttttttagattgttattaaaatttattaaggttaaagttaaatttttatttgtgggtaagagatgagttgtttgtataaatttttgttaaatgatttgatgtgtttatagtttatatttaaaaatggtttattaataatattaatttagaaaataaaaatgaataagttatattttgttaatttaattattttaaaatacgtaatttgaatttaaagagtatttgattatttttttaagtcgttgtatgtatagaggtttagtaatatttatgttaatattttttttttttttagttagagggttaataaaacgttgaagaaatttttttaagtggagagaaaattgtattaggtatatagtatttgggaataggtaattattaaaaatatataaagttatgagtatgttattattaggagatagaaataaataatattttttttttttttttttttttaaaatttaatttggagatggagttttattatattggttaggttgttattaaatttttggttttaagtgatttttttattttggttttttaaagtattgggattataggtgtgagttattataggtggtttttttagttattatggttatttagatatagattataaatacggttttttaatatttttagagtttaaagtaagaattttaatatatgtagtttatttgaaagttttttttgtatgttgttatatttatatttgttttttagattataagtttttggtttagagattgtttatttgttattatattttttgttgttgtttatatagaaaaatatgatagaattatgaaaatagagttatttatatgatattcgttataagatggttttaggagattgtatatttatttcgttagattgtagatttatttgtaggtttttttgtgtagagtttaggttaggtttttgttttataggtgtgtttttaatattattttttggggttttttttattcgagagttgggagtgtcgtatgttagtggtgaattaatattaaagttaagagggatagttataaaaataaaattaggaaattttggtggtatattaaatttgaaattatagtatgttgtttgttgatttatattatttaatcgtaatagtaaattgaatatttattgtaatttgcggtggttgagattttgagtatttttaaatgttttattaaaaaaaagtattagagaagttgttttttttgtttattaagttttaaaattattattttttgtatttcgtttagtttttttggttaagaatatgtttagttacgtgtagaggggatgttttaggcgttatgttaattgttataaagttagtaaatttgagtagataaagtattagttgtgtattaagtatagtaaaattaagatttttagatacgtatttgaagaatgtatttggggagggttggaaaatagtacgttttgcgtagtagggttttgtaggtttattttaggcgaggttggtatcggttgtaattttttcgtggaggtggaattttcgtttttacgtttttgagagggagatgatttggtatttttatttcgagtttgtgttatataaaatagaaaagatagttattaatttttagggtcggtttttttggatttgttttttttttggggtattatgatttattattgaattaaattaaatagaggtaaatggtaatcgaattaagtagtatttaggttatagtttgttgtgggtgtttgtgcgtattaagcggtagcgtttagttcgaggttgagcgttcgggtttcgcgtatttatttagcgttgttagttgcggcgagagggtagacggggcggcgtcgggggttgtagtgggttcggttcgggggatttacgcgtttgggcgggggtggtttttttacgtcggttgtcgcggcggttcggggtcgacgtcggggacgatatagtgttcggagtatttgcgcgataaggataagttcgggtcgggttcgtttttcggtttttttgttttgtttcgtagcgcggacgttttcgtcggtttcgcgttacgtttttttcgtcggcgcgcggttatcgtggaaaggcggtcgtttgtcgacgacgttcgcggatttcgagtttatttggcgagtagcgtttttaaatcgcgagatttagagttttcgtcggcggtaaggtcgttttcgtttttggcggggttttattaattatagcggcgttcgtacgtggtttcgttttcgggaggcgttattgcgtatcggtagggggggatagtgtcgttttttttagcgttcgtgcgtaaattagaagtaggtttcgttcggttttttttggtttagatggtttgattttttgcgcggtagcgttttcgcgggaaaattgggttttatagtattagttttcggggtgtgtttttttagcgttggttagggagcgtgtgtttttttattttttaggcgtttttggttaataaggatattatagatgtattttttatttaaagattttttttattaaaaaaaattaaggacgggaggtggtggggatggttttattatgttgtttagattggtttcgaatttttgcgattttttcgttttagttttttaaagtgttgggattgtaggcgggtattatcgttttcgatcgcgtttgtcgttttttatcgaggaataaatttggaatttttgatttaggtttttcgtttgttttatttgtttttggtatttatttagttaagtttaatattaagtagttatttaaattattttcgtaggttagacgtttttttttaggtttttatgttgattcgggttaaagaggcgcgtttattggttaggttttttcgtaggggttttcgggaaagtttttgtcgtcgcgtttcgtagtttcgttttcgcgcgtaggggtattttcgggttcgggtcgagcgggcgtacgcgcgggagcgggattcggcggtatggcgggtttcggagtcggtgtgcgttgttttttgttgcggttgtaggagattttgttcgttgcggatcgttgcggtgttgttttggtcggttattaattgattcgcggtttggggtaggaatgcgttttgagtagtagtttcgcggtgttgggtgggtatcggttcgagttgggtcgcgggtgggttttggtttttcgagtcgttttggagtcgggtagttcggcgtttttttgtgtttagatgacggtattttgaagtatagtaattagatttttgggggaatttttgtgtatgtgtataaagggatttgttatattgttttttattttttagtattagaggaaagatattttaaagttaaagttggtgaaaacgatttttaatatggtaattattgttatgtagagtggggggtagggtaagagaaataattttttttttttttgagacggagtttcgttttgtcgtttaggttggagtgaagtggcgcgatttcggtttattgtaattttcgtttttcgggtttaagttatttttttgttttagtttttcgagtagttgggattataggcgcgcgttattacgttcggttaatttttttgtatttttagtagagatggggttttattatgttggttaggttggtttcgaatttttgatttcgtgattttttcgtttcggttttttaaagtgttgggattatagacgtgagttatcgggttcggttaagagaaagtatttttttttatttgaatttcgtttaattttattagtattttttttaaatttttttatttgtcgtttttattttgagaaaaattgaagaaatgtaattgaagttatgtttttttaattttttagtaatgtttgggtgggaatttttttttttttgtagtaaaagtgtttttttttagtattttaaatatttaaatatttaattatgtggattttttgtattttttttttaaaatacgagtatgtagattttgatgttgtgttttattaaaaggtgagattttttttcggagggtttagtagtgaatatggtgtaggaataatttaaatagtttaaattagatgttatatgtggtacggtgcggtggtttatgtttgtaattttagtattttgggaggttgtggtagttggattatttgaggttaggagatggagattaatttgattagtatggtgaaattttgtttttattaaaaatataaaaattaattgggtatggtggcgagcgtttgtagttttagttattcgggaggttgagataggagaatgttttgaatttaggagaaggagattgtagtgagtcgagattgtgttattgtattttagtttgggtaatagagtacgatttcgttttaaaaaaaaaaaaaaaagatgttatatatatgtattttatatgtattttatttgttgttaagaatatattaataatggggaaatattaaataaaaaattaatattgcgtgattattttttttttttagggttttaaatttagaatttatttttgttcgtttagtaatttgtttttaaagtatttttaagtttattttttatttatgttatatttttttttatttgagagattttaggggaagtgtattagttttttattgttgttgtaataattattataagtttagtggtttaaaatagtataggtttgttatttttatagtttttattgtaagggggattttgtgagttagaattttatataggttttattaagttagaattaaagtattagatagggttgttttttttttgaaggtttttggggaggatttattgttttatttatttaggttatataggattgaggtttttgatattttatattttttgaagttgttttttttttttggattatagttttttttttttggtttttaaggttagtaatagtatgttaagtttttttaattagaggtttggaatttttcgtttttttaattttttgtttttttgatttatttttttttatttttttattttaagggtttgtgtgattatattgggttttttggataatttagtatgatttttttattttaaggttagttgattagttattttaattttatttgtaagtttaatttttttttgttatatatatttaatatatttataagatgtgattttagggattgggatgtaggtatttttggggttattattttgcgtattgtatttttgtggaatattgtttagaattttttgttttgttttaatatagtaattttgggttagtgttttatatttataaggttgttttgaaaatcgttgtaattttggttaggcgcggtggtttacgtttgtaattttagtattttgggaggtcgaggcgggttgatcgtgaggttaggagatcgagattattttggttaatacggtgaaatttcgtttttattaaaaatataaaaaaaaaattagtcgggtatggtggtgggtatttttagttttagttatttgggaggttgagataggagaatggcgtgaattcgggaggcggaggttgtagtgagtcgagatcgcgtcgttgtattttagtttgggcgatagagcgagattttattttaaaaaaaataataagaaaattattgtaatttttttaggagtggtttatatgatgtttttggtatttttttaatttgtttatttatttttttgaatagt

SEQ ID NO: 68 - DNA, 7695 bp, Artificial Sequence
  chemically treated genomic DNA (Homo sapiens)
gttgtttaaaaaaataagtaaataagttaagagagtgttaagagtattatgtaaattatttttaaaggggttgtaatgatttttttattattttttttgagatggagtttcgttttgtcgtttaggttggagtgtagcggcgcgatttcggtttattgtaattttcgtttttcgggtttacgttatttttttattttagttttttaagtagttgggattaaaggtgtttattattatgttcggttaattttttttttgtatttttagtagagacggggttttatcgtgttagttaggatggtttcgattttttgattttacgattagttcgtttcggttttttaaagtgttgggattataggcgtgagttatcgcgtttggttaaggttgtaacggtttttaaggtagttttataaatataaaatattaatttaaggttgttgtattaaaataaagtagaaaattttagataatgttttatagggatgtagtacgtaaaataatggttttaaagatgtttgtattttaatttttggggttatattttgtgaatatgttaaatgtatatagtaaaaggaaattgagtttgtagatggaattaaggtagttaattagttgattttaaaatgggaagattatattggattatttagagagtttaatgtaattatataggtttttaaagtaaggagatgaagaagagtgggttagagagataggaagttgggaaagcgggagattttaaatttttagttagggggatttgatatgttgttgttggttttgaagattaagggaagggagttgtgatttaaggaaaggggatagttttaagaagtatggaatgttagggattttaattttatataatttgaatgaataaggtaatggattttttttaagagtttttagaaagaaagtagttttgtttggtattttggttttagtttggtgagatttgtgtgggattttgatttatagaattttttttatagtgggaattgtaagagtaatagatttgtgttgttttaaattattaagtttgtggtaattgttatagtagtaataaggaattaatatattttttttggaattttttaagtgaaaggagatatggtataaatggaaggtaaatttggaagtgttttagaaataagttattaaacgaataaaaatgaattttaaatttgaaattttgagaagagaaagtaattacgtaatgttagttttttgtttgatatttttttattgttaatatatttttgataatagatagagtatatataggatatatgtatatagtattttttttttttttttttgggacggagtcgtgttttgttgtttaggttggagtgtagtggtataatttcggtttattgtaattttttttttttgggtttaagatatttttttgttttagtttttcgaatagttgggattataggcgttcgttattatgtttagttaatttttgtatttttagtagagataaggttttattatattggttaggttggtttttattttttgattttaggtgatttagttgttatagttttttaaagtgttgggattataggtatgagttatcgtatcgtgttatatatagtatttagtttaaattgtttaagttatttttatattatatttattattagatttttcggaagaaaattttattttttaatagggtataatattaaggtttgtatattcgtgttttaaagaaggaatataggagatttatataattaagtatttgaatatttaaaatgttaaaaagaggtatttttattataaaggggaaaaagtttttatttaggtattgttaaagagttaaaagaatatgattttaattatatttttttaattttttttaaagtaggaacggtaaatagaggggtttggaaaaggtattggtgggattaggcgagatttaggtgaaagaaaatatttttttttggtcgggttcggtggtttacgtttgtaattttagtattttgggaggtcgaggcggggggattacgaggttaggagttcgagattagtttgattaatatggtgaaattttatttttattaaaaatataaaaaaattagtcgggcgtggtggcgcgcgtttgtaattttagttattcggggggttgaggtaggagaatagtttgaattcgggaggcggaggttgtagtgagtcgagatcgcgttattttattttagtttgggcgatagagcgagatttcgttttaaaaaaaaaaaaaattattttttttgttttgttttttattttgtatagtaatgattgttatattaggggtcgtttttattaattttggttttaaaatattttttttttaatattagggggtaaaaagtagtatgataaatttttttatatatatatatagaaatttttttaagaatttaattgttgtattttaaaatatcgttatttaaatatagagaagcgtcgggttgttcggttttagaacgattcgggaagttaggatttattcgcggtttagttcgggtcggtatttatttagtatcgcggggttgttgtttaggacgtatttttgttttaggtcgcggattagttgatgatcggttagggtagtatcgtagcggttcgtagcggataaggttttttgtagtcgtagtagggagtaacgtatatcggtttcggagttcgttatgtcgtcgagtttcgttttcgcgcgtgcgttcgttcggttcggattcggaaatgtttttacgcgcggaggcggggttgcggggcgcggcggtaggaattttttcggggatttttgcgggaaggtttggttagtaagcgcgtttttttggttcgaattaatatggaaatttaaggaaaaacgtttgatttgcggaggtagtttgggtggttatttggtgttggatttggttaaataaatattagaggtagataaaataagcgaggggtttaggttaagagttttaagtttgtttttcgataaaaaacgataaacgcggtcgggggcggtgatgttcgtttgtagttttaatattttaggaagttgaggcggggggatcgtaggagttcgagattagtttgggtaatataatgagattatttttattatttttcgtttttaattttttttaataaaaaaaatttttaagtgagaaatgtatttgtaatgtttttattaattaaaaacgtttaagggataaagaagtatacgttttttagttaacgttagaggaatatatttcgagagttggtgttgtaggatttagttttttcgcgaaaacgttgtcgcgtagggggttagattatttggattaaggggggtcgagcgaggtttatttttggtttacgtacgggcgttgaaagaagcggtattgtttttttttgtcgatgcgtagtggcgtttttcggaggcggagttacgtacgagcgtcgttgtgattggtgaggtttcgttaggggcggagacgattttgtcgtcggcgggaattttgggtttcgcggtttgggagcgttattcgttaggtggattcggagttcgcgagcgtcgtcggtaagcggtcgtttttttacggtaatcgcgcgtcggcggggagggcgtggcgcggagtcgacgggaacgttcgcgttgcggagtagggtagggaagtcgggaggcgggttcggttcgagtttgtttttgtcgcgtaggtatttcgagtattatgtcgttttcggcgtcgatttcgagtcgtcgcggtagtcggcgtggaagggttattttcgtttagacgcgtgagtttttcgagtcgggtttattatagttttcggcgtcgtttcgtttgttttttcgtcgtagttggtagcgttgggtgggtgcgcgggattcgggcgtttagtttcgggttgggcgttgtcgtttggtgcgtatagatatttatagtaggttgtggtttgggtgttgtttaattcgattgttatttgtttttgtttggtttggtttagtggtgagttataatgttttaaggaaaagataaatttaggaaggtcggttttgaaagttaatggttgttttttttgttttgtgtgatataagttcggagtgaggatgttaggttattttttttttagagacgtagaggcgaggattttatttttacgggggagttgtagtcgatgttaatttcgtttggagtggatttgtagagttttgttgcgtaggacgtgttgttttttagttttttttaaatgtattttttaggtgcgtgtttgaagattttggttttgttgtgtttgatatatagttgatgttttatttgtttaggtttattggttttataatagttggtataacgtttaaagtattttttttgtacgtgattgagtatgtttttaattagaggagttgaacggagtgtagaaaatagtagttttagggtttagtgagtagaggaagtagtttttttggtgtttttttttaatagaatatttaagagtgtttagaattttagttatcgtaggttgtaataaatatttagtttgttgttgcgattagatggtatagattaatagataatatgttgtaattttaggtttgatatgttattagaattttttaattttgtttttatagttattttttttgattttgatgttagtttattattgatatacggtatttttagttttcgggtagagggaattttaagaagtggtgttaggggtatatttgtgagatagaggtttgatttgggttttgtatagaagggtttgtaagtggatttgtagtttgacggggtgagtatgtagttttttgaaattattttatggcgggtattatgtgggtaattttgtttttatgattttgttatgtttttttgtgtaggtagtagtagaagatatagtggtaagtgagtagtttttaggttaaaaatttgtgatttggggaatagatgtaaatgtggtagtatgtaaagaaaatttttaggtgagttatatgtattaaaatttttattttgggttttgaaaatgttgggagatcgtgtttataatttatatttaagtagttataatgattagaagggttatttgtggtggtttatatttataattttagtattttgggaggttaaggtgggaggattatttgaggttaggagtttgatagtagtttgattaatatagtgagattttatttttaaattaaattttagaaaagaaaaaggaagaaaaatattatttatttttgttttttgatagtgatatatttataattttgtgtgtttttagtagttgtttgtttttaaatgttatatgtttaatatagttttttttttatttaaagagatttttttagcgttttattgattttttggttaaagaagaagaaaatgttggtatagatattattgaatttttatatatgtaacgatttggggaggtaattaaatattttttaaatttaagttacgtgttttaaaatagttaaattagtaaaatataatttgtttatttttattttttagattaatgttattggtgagttatttttaaatgtgaattgtgaatatattaaattatttgataaaaatttgtatagataatttattttttatttataggtaagaatttagttttgattttgatgaattttagtaatagtttagaaagaatgtttttagataatagaaattttttagtaatgaagatagtatgcgtaaatattttaagaaattgagtattattttttttggttcggtgtggtggtttatatttataattttagtattttaggacgtcgaggtaaatggattatttgaggtcggaagtttgagattagtttgggtaataaagtgaaattttatttgtattaaaaaatataaaaattagttagatatggtggtgtatgtttgtagttttagttattcgggagtttgaagcgatagaattatttgaatttcggaggtagaggtgtagtgagtcgagatggtattattgttttttagtttgggtaatagtgagattttattttaaataaataaaaaaaaattatgtattattttttttaagatgaatattttttttttatattttaatgtttttgaaagtgggatttgtattattattaatgataggttatggtttatttggtagtgttttttatgtagaaaaatgatgaattttaaaattgatagttttttgggttttatgaagtaagttattttaaatggaaatattttaaatgaattatatattttttgttgttttgaaagaatatattgtattgtagatttttatttttaagttttaggttagtttttattaatgaagtattagttttgttgattttgggtgtagtttttggaggtaagtagatttggtttttgaattttggttttgttgattattggttgtataattttggttaagttttttagttaattaaaagttgtttttttatttgtaaaatgggaattatatgttaagaaatttgaataaatatgatttaatttattttggtatcgttaggtacggtggtttatgtttgtgattttagtattttgggaggtcgaggtaggtagattatttgaggttgggagtttaagattagtttgattaacgtggagaaatttcgtttttattaaaaatataaaattagttaggcgtggtggtaaatgtttgtaattttagttattcgggaggttgaggtaggagaattatttgaattttagaggtagaggttgtagtgagttaagattatgttgttgtattttagtttgggtaataagagtgaaattttgttttaaaaattaaaaataaataaataaaaaatttattttggtattattttattatagaaggaaaataaagtgtgaggttaaaattttttttttttttaatagaaagtaaagaatatgttagtatatattaagaaggtattttcgtataaattatgaaatttaatttaattgaaaatatgtagaaatagatagtttagtatatttaaatttgaaaatagtacgtgtatgattttgtagggtaatattttggggatatgatatgttgtttttttatattttgttaatttgatatgtttttattatatttaatattgagatatgaatataaatatatttttatatttgtttttataggaagttattttaatttttgatatggttgttaatgaaattttttttgatcgttattttgatttaattttagaatattagatttaagtaagattatttaacgtattgaagattaagaatatgagaaatttgaatttagaaggtaatgtattttttataggattatttttgttgaaggaaaatgttttatatgaaaatagttttgtttttattgagaaattatgaaagaagtaattggcggtggtagttaaggtgacggattataaattgataataatatagatttagttattttatatatttatgaattttttatattttttaaatttaattgaagtttttgatataagagatgtgattattggtcgggtatagtggtttacgtttataattttagtattttaggaggtcgaggtaggcggattatttgaggttaggagtttgagattagtttggttaatatggtaaaatttttttattaaaaatagaaaaattattagggtatggtggtatacgtttgtagtttcggttattttcgggaggttgaggtaggaga

SEQ ID NO: 69 - DNA, 6227 bp, Artificial Sequence
  chemically treated genomic DNA (Homo sapiens)
tatttttacgttttttttttaatgtatttgatgatttattggtagtattttgtgatgatattatattagtggtaataagaatgtttttggattcgattaatgatggattaattagaatattttgaattgttgaggttgtaggaattgaagtttttatagttggagattgagaagtaggtatttgtattgtaaatttttgatttgtgagggatatgggagtttttattttagttgaaatagatatggtttgtggggttggtgtgtttagtgtgggagtatttggtttgttagtaattgaattaatatttaatcgcgggattgttatttttttcgtagaagttgatgtttttttttgtaaagattttagtttatagtttggagttgttaagtagtatttattaggtggtaatttaggatttgaatatggtttgattaatggtaaaggggtttgatttttttgttttgtaatatttaataaaaaattttttgggggaggagaggtaaaagattgattagcgcggtattggattgttaatcgtatattatttgtattaatagtagtttttttagtatggtttgaataaatttttgtattatttagaattgtggttatatatcggaaggtaaattttaatatttgatttataatttttggtttatattttgtaatttttatattttttaggatttgtgttattatttgtgtatttttcggtatgtttttgggagaagtcgttttgttagattttatgatattcgatgattagattttagattatttgaaaaaaatatgtatattagattaatttgaaatagttattttagtagtaattgttaggaatttaaaaaaattttaaatttatgttaaattgtaaaaaaatttttaaaatttaaattatatgtttttttaattttaatgaggtaatttaaggtcgttttaatttattgagtttttattatgtataaattattgtcgattataaaaagatgaagatataaataagggagcgatgaaagattaggggaaaatagggtaaaataaataaaaataatgattattttagaatatatgtagttgtatgtaaattttatattaatttaagatattatagtatagttaggttttatatttgagtttaaaatagtttttttttagtgagattaatatatttattgtgtttatatatatgtttagtagtattaaatttttgtttgtttaatttaaaaatattttttttatttatattttatttattcgaaatttagtttttttataggagtttttttaattatttataagaattgttagttattttgaaggcggaagggaaaatggttaaaataattaggatatagtattagatatttaatatttttgtggattttttaatagagtatatattttttaatggtaatttttgttttttgtattttatgataatatttagtattaatattttatttattagattttaaaaaaaaaataaaataaatttaatattaaagtgttttttattttttcgagttaaattatttatattaatgtattttagttttgattttgacgtaagttttttgtttagtgtggtttttttaatttttggtgtatttgtaagataagttatagaaaaatattgtttgtgaaatattatttattatattgcggtttattttttgtttttttttttatttttgagatagagttttatttggtttttgtttttaaaagtttttgacgattgaaatgaaaaattttttaattagtaattatatgtaaaattttttttttgagatagagttttatttttgtcgtttaggttggagtgtagtggtataattttggtttattgtaatttttattttttaggtttaagcgatttttttgttttagtttttttagtagttggaattataggtgtttattattatatttagttaatttttgtatttttagtagagatcgggttttattatattggttaggttggttttaaatttttaattttaggtgatttgttagtttcggttttattttaattgttatttgtttaatttataaagatttaaaaattgtttatggttacgtgtggtggttcgcgcgtgtaattttagtaatttgggaggagaaggcgggaggatcgtttaagcgtaggagttcgagattagtttggttaatataatgagattttgttttaaataaaaataaaaataagaataaaaataaaattgtttatgttaaaattaagtagtttgaaaattatttttattgattttttgcgtttttttttagagataattattgtaaattagtttttttttttaaagaaattttatttatgtttgtatgtaaatgtatatatatgtatatattttttgttatataaatataatatatatttttttttatataaatgataatattatatatattgttttttattttttttttttgatatttattaaaattatattttaagattattaaatttataatttttagttatttagatttaatatttttgaaattaaatttaagtataaagataatagggataatttagtttttatatttaggagaataacggttattttaagtttattataatatattaagtttgaattttggatttaatatgtttttaataaaatgtttattttaaagttttgataatgatttaataattagggtattatgtttgatttatgtaaaaagatgtaaaatttttcgtttaaggaatttaaaattttaaacgttatttgtggggtggttaatttgtattttttagaaatagatatgttttgtgcgttgttaataattttatttttgggtgaatgatgtaattttattgtttttataaagagttttaatttttttgtattttgtaataaaatttatatgtattagatttttttacgaatggtttataatttgataaatatttttaggattaaacggttagtaaaaatattcgttaaagtcgttatgtagtattttaattttttttattgataatacgtattttgagtatggttttaaagatttatttttacgcgagaaacgattcgaaatgttttatatgttttttttttaaggggcggggggattttttgatgtaatttaataaaagtatatagtaatttcgttacgttataaatatttgaattcgtttatcgaaatttaatttgaggcgtttattagaagtaaagaaaaaataaaatacggtttacggaggtttaaggagtgaggtatttattattaatgattttatcgggaagtagatatggttttacgttatttcgttaaaaattttaaggttaattttgttaaagaattaataatttattttataaacgaaatattagatttagaaagattaagtaggttgttaagttggagagttggatttgtcgatttttttttattttttttcgttttttttcggagttttaggttaacggaattaacgtttcgcgttttttttttcgtttttcgtaacgttcgcgagggtcggttttcggggcgttgataatcgtttcgtggttttcggtcggtttttgaagagggtagtgaggggtttttatttgggcgttcgatgtttagagtattttgcgtttttagtttgttttagtttagtttttttcggtcgcgcgttttgatcggtgagtaggatgttcggaagtaatatggttttcgtcgcgacggtttcgggcgtttcgtttacgtgttttttgttttatagggaggagtcggaaggggcgggcggtagtaaaagtttacggttttaaaggtttcgaagtttatcgcggcgtttttagtttgtttcggcggtttagtcgcggtttattggttatttggttttcgatgatatattttcgtcgtaaagttggagggtgggtataattcgggtcggtatttcgggttaggtagtgcgttggatgtttaagttatatattttttcggtggttttcgtttttcgtttgcgtcgattagtttggaaggttttcgggaggtcgtattttcgagaggttcggcgttgagttcgggtagggttaggtggttgtttttttatttagggtagtttttggtcgttttcgtttttcgtttaaaaggggatgtagtttcgggaaagtaaggtcgtcgcggttgcggttatattatgtatatgttttagagacgcgagtttatttttgtttttaagtttttttgggttttcgtcgttttttttttcgattcgtttattttatttggggatgagaagattgagggtgtagagttttgttttgtagcggggatttgcgagtttaattcggtattttattgattataggattacgttggacgaatatttgagtttagtattttttgtttattgtgtggggtggtggtgggtcggttaggaatagttttgaaggtttatttttgatattttattttagtaatttcgtatttttagggatagttatttgttttttaaaggaggtaattgttaattttgtttttaagagtgaatagagatttgatcgtgataatagtttgtatttttttttgtttgtttgtttgtttttgttttgttttgagacggagttttatttttgtcgtttaggttggagtgtaattttcgttttttgggtttaagtgatttttttgttttagtttttagagtagttgggattataggcgtttattattacgttcggttaatttttgtatttttaatagagacggggttttattatgttttggttaggttggttttaaatttttgattttagatgattcgttcgtttcgtttttttacggtgttgggattataggtatgagttatcgcgttcggtttttggtttgtattttttatttcgagttataaattatatttatttaaataggtgttttttttttatttgtatattttttgaaacgttatagtttttaatcgtgaacgatttggggcggagggttgaataatgtgttttttagtgtgtcgaggtgtttataggttatgtgtgtttttaaattgtaaagtagtttagtatattttttaatgtataagtttgtagattttaaattttttttttggttaatttaaaatcgttgaatttattagtttgtataaatatttaagaatttgaaaatacggttgaaaaatagtgttattaagaaattttgtaataatatgtttaaatgaagataaaaattttatagtttaagatttaaatttttcgtttatagtaagtgaatttatggtattttatttttttgggaaatattggaaatgaagatttgtaattgtaatttgaaataaggaaaattttaatttttagtataaaaattgtttaaatagaattgtttgattttaatgataaaaggtaagtatatagtatgtgtggtttttttgtttttttttttttaatatattattgagtttatgtgaaaaatttttaatattataagtagattatttgatatagttatagttattaaaattattttagaattttgattttttgtattatttaaatttattgtttttttttattagtttttgagtttttattgtattgttgattatattagtatatatttattattataattgggtatttatagtttttttttatttgagggttttttttttttttttttaggtgaattatagtttaatgtattgtaagttttaaattacggatgggaattattatagtttataatgttaaaaattttttttagattaaaggtattttttataaaggtatgatatattggaatggttatgtaataattgttttaaaataattataaatttttatatatatttttaataatttattattgttattaaagtaatagagtcgagtatttattgtaattaatgatttaagtaagtttggtaataagttgtgaaataagtgttttttaaaagtataattttaattttgaaaaagtgttttatagttttagttataaaggttgaaaatatttgaatgaaagaatatagaagagagaaatatgagtggtagttggtgttatagtttaattaaaagtattgttttttagaagtaatgtaatttagtgtgtgagtttttagtaagataggggttaaggtgggatgggggttagatagttttatgtatgtagggtagttatttttttaagtggtagttttaaattttttttgatgttaagtaagttatttaattttgttgtttattttttttttttttttagt

SEQ ID NO: 70 - DNA, 6227 bp, Artificial Sequence
  chemically treated genomic DNA (Homo sapiens)
attgaaaaaaagagaaagataaatagtaaagttaagtaatttatttaatattaaagaaaatttagagttattatttagggaaatagttattttgtatgtatgaaattgtttgatttttattttattttaatttttattttgttgagaatttatatattgaattatattatttttaagaagtagtgtttttggttaagttataatattaattattatttatattttttttttttatgtttttttatttaaatgtttttagtttttgtgattgggattgtaaaatatttttttaaaattaaggttgtgtttttagagaatatttgttttataatttattattagatttgtttaaattattaattataatagatattcggttttattattttgatagtagtaataagttattaagaatatatataaaaatttataattattttaaggtaattattatatggttattttagtgtattatatttttgtggaagatatttttggtttaagaaaagtttttgatattataaattgtaatagtttttattcgtagtttaggatttgtagtatattaaattataatttatttggggggggggggaagaagtttttaaatgaagaaaaattgtaaatgtttaattatagtaataaatgtatattgatataattaataatataataaaggtttaagaattagtgaaaaagaatagtaaatttaagtgatataagaaattaaaattttaaaataattttaatgattataattgtattaaataatttatttgtggtgttaagagttttttatatgaatttaatgatgtattagaaaaaaaaaaataaaaaaattatatatattatgtatttattttttgttattaaaattaggtaattttatttgagtaatttttatattgaaaattaaagttttttttattttaaattatagttgtaggtttttatttttagtattttttaaaaaagtaaaatattatgaatttatttgttgtggacgaagaatttaagttttaaattgtaaaatttttgtttttatttgaatatgttattataaaattttttggtaatattgttttttaatcgtgtttttaaatttttaaatgtttatgtaaattagtgaatttaacgattttaagttagttagaagaaaagtttaaggtttataaatttatatattggaaagtatattggattattttatagtttggaggtatatatagtttataaatatttcgatatattagaaaatatattgtttagtttttcgttttaaatcgtttacgattagagattgtgacgttttaaaaggtatataggtggaaaaaaaatatttatttgagtaaatatagtttgtagttcgaaataaaagatgtagattaggggtcggacgcggtggtttatgtttgtaattttagtatcgtgggaggacgaggcgggcggattatttgaggttaggagtttgagattagtttggttaaaatatggtgaaatttcgtttttattaaaaatgtaaaaattagtcgggcgtggtggtgggcgtttgtaattttagttattttggaggttaaggtaggagaattatttgaatttaggaggcggaggttgtattttagtttgggcgataagagtgagatttcgttttaaaataaaataaaaataaataaataaataaaaaaaggtgtagattgttgttacggttaggtttttatttatttttgaaaataagattgataattattttttttaaaaagtagataattgtttttgaagatgcgaggttattgaaatgagatgttagaggtagatttttaagattatttttagtcgatttattattattttatatagtgaatagggaatattaagtttaaatattcgtttaacgtaattttgtaattagtggggtgtcgggttgagttcgtaaattttcgttgtaggatagggttttgtatttttaatttttttatttttagatgggatgggcgggtcgggaggaggagcgacgagagtttaggaaagtttgaaggtagagatagattcgcgtttttaagatatatatataatatagtcgtaatcgcggcggttttattttttcggagttgtatttttttttgggcgaagagcggaggcgattagggattattttaggtgaaagggtagttatttggttttattcgggtttaacgtcgagtttttcggaggtacggtttttcggggattttttagattggtcggcgtaagcgaagggcggggattatcgaaggagtgtgtgatttaggtatttagcgtattgtttgattcgaagtatcgattcgagttatgtttattttttaattttgcgacggaaatgtgttatcgaaagttaggtaattagtgggtcgcggttgggtcgtcggggtaggttaggggcgtcgcggtgggtttcggggtttttggggtcgtgggtttttgttgtcgttcgtttttttcggtttttttttgtagagtaaagggtacgtgagcgaggcgttcgaagtcgtcgcggcggggattatgttgttttcgaatattttgtttatcggttagggcgcgcggtcgggagggattgggttggggtaggttgggggcgtagagtgttttgggtatcgggcgtttaggtgggggttttttattgttttttttagaggtcggtcgagggttacgaggcggttgttagcgtttcgggagtcgattttcgcgggcgttgcgggaggcgagggaggggacgcggaacgttaatttcgttggtttgaggtttcgggggggggcgggggggggtggagagaggtcggtagatttagttttttagtttggtaatttgtttagtttttttgaatttggtatttcgtttgtaaaatgggttgttgattttttggtagggttggttttgggatttttagcgaaataacgtaaggttatatttgtttttcggtagagttattaatggtggatgttttattttttaggttttcgtgggtcgtattttattttttttttgtttttgataaacgttttagattagatttcggtaaacgagtttagatgtttgtgacgtgacgaaattgttgtatgtttttgttgagttatattaaaggattttttcgttttttaaaaggaaggtatatagagtatttcgggtcgtttttcgcgtaggagtgggtttttgaagttatatttagggtgcgtgttattagtgaagggaattaaaatgttgtataacgattttaacgaatatttttgttagtcgtttagttttgaaagtgtttattaaattgtaggttattcgtggaaaaatttaatgtatgtagattttattataaggtatagaaaaattaagattttttgtgggaatagtaaagttatattatttatttaaaggtaaaattgttggtagcgtataagatatgtttgtttttgagaggtgtagattaattattttataaataacgtttagaattttagattttttaagcggaagattttatatttttttgtatggattaaatatagtgttttggttattaagttattgttaaaattttaaagtgaatattttattgaaaatatgttgagtttagggtttagatttggtgtattatagtggatttgaggtgatcgttatttttttgggtatgggaattggattatttttgttatttttatgtttaagtttaattttagggatgttaaatttgaatagttgaaaattatgaatttgatgattttgaaatgtaattttaataggtattagaaggggaaggtaaagaataatgtatatagtattgttatttatgtaaaagggaatatgtgttgtatttatataataaagagtatgtatatatatgtatatttatatgtaaatataaatagggtttttttgggaaaggaaattggtttatagtggttatttttagggaagggcgtaaggggttagtagaggtaatttttagattgtttaattttaatatgaatagttttgtttttgtttttgtttttgtttttgtttgagatagagttttattatgttggttaggttggtttcgaatttttgcgtttaagcgattttttcgttttttttttttaaattgttgggattatacgcgcgagttattatacgtggttatgaatagtttttaaatttttataagttaaataaatagtagttggggtgaggtcgaggttggtagattatttgaggttaggagtttgagattagtttggttaatatggtgaaattcggtttttattgaaaatataaaaattagttgggtatggtggtgggtatttgtaattttagttattgaggagattgaggtaggagaatcgtttgaatttgggaggtggaggttgtagtgagttaagattgtgttattgtattttagtttgggcgataagagtgaaattttgttttaaaaaaaaaattttatatatgattgttaattaggaaattttttattttagtcgttaagaatttttaagggtagaggttaggtgagattttgttttaaaaataaaaggaaaggtagaaggtggatcgtagtgtgataagtagtattttataaatagtatttttttgtggtttgttttataggtatattaggggttggaaaaattatattaggtaaagaatttgcgttaaaattaggattgaaatatattaatgtgggtgatttagttcgagaaggtaagggatattttggtgttagatttgttttgttttttttttaaggtttggtaagtggagtgttagtgttgggtattgttatagggtataaaaaatagagattgttattaaagaatatatattttgttagggaatttatagaaatattaagtgtttaatgttatgttttggttattttgattattttttttttcgtttttaaaatggttggtaatttttgtgaatagttgggaaggtttttataaagagattggatttcggataggtagaatgtgaataaggagaatgtttttaagttgaataaataaaggtttggtattgttaaatatatatatgagtatagtgagtatattggttttattggaaagagattgttttgagtttaggtgtgggatttgattatgttatggtattttagattagtgtgagatttgtatgtaattgtatatattttaagatgattattgtttttatttattttattttgtttttttttaattttttatcgtttttttatttgtgtttttatttttttatagtcgataatgatttgtatatggtaggaatttaataaattaaagcgattttaagttgttttattaaaattaagaaaatatatggtttaaattttaaaaatttttttatagtttaatatagatttaaaatttttttaagtttttgatagttgttattaaagtaattattttagattgatttaatgtatatattttttttaaatgatttaaagtttgattatcggatattatggagtttggtaagacggttttttttaagagtatgtcgaaagatgtatagatgatggtataaattttgaaggatatggggattatagaatatgagttaagagttataaattagatgttggagtttgtttttcgatatgtgattataattttagatgatgtaaaaatttatttaagttatgttaagaaagttattgttgatgtagatgatgtgcgattggtaatttagtgtcgcgttgattagttttttatttttttttttttaagagattttttattagatattgtaaggtaaagaaattaaatttttttgttattgattaagttatatttaggttttaggttgttatttgatagatattgtttaatagttttaaattataggttgaaatttttatagaaaaaggtattaatttttgcgggaagaataatagtttcgcggttaagtgttggtttagttattagtagattaagtatttttatattaggtatattaattttatagattatgtttgttttaattaaagtagggatttttatgttttttataggttaaaggtttatagtatagatgtttattttttagtttttagttgtaaaagttttaatttttgtaattttagtagtttagaatgttttgattaatttattattaatcgggtttaaaaatatttttattattattaatatgatgttattataaaatattgttaatgaattattaaatgtattgaaaagaaaacgtgaagatg

SEQ ID NO: 71 - DNA, 6935 bp, Artificial Sequence
  chemically treated genomic DNA (Homo sapiens)
aaaaggaggatttttggggtattttaagtgtataagattatttaagaggaaagggatagggtaggtattttaggtgagtttgatttaaaaatggtattttttgtaaatagtattttttggtttgtttttgtgaagtttttatagtaatttttttaaggttatatttgttgtgtattaagtatttttttaagtatttttatgtaaattaatttttttatttttaaagatttagaaggtggttaggtaatttagttagttagttggggttgggtatagtggtttatttttataattacggtattttgggaggttgagatagaggattgtttgaggttaggagttatataatttaatttagtttggtaatatagcgaggagattttatttttataaaaaaaatttttttttttgagatagagttttatttttgttgttgaggttggagtgtaatggtacgattttagtttattgcgtttttcgttttttggttttaagcgatttttttgttttagttttcggagtagttgggattataggtatgtgttattatggatgttaggttaatttttttttttttttttgagatcgtgttttgttttgtcgtttaggttggagtgtagtggtgtgatttttgtttattgtaagtttcgtacgattttttaggtttattttatttttttgttttagggtttcgagtaattgggattataggtattttttattatgtttggttaatttttttgtatttttttttttagtatagatatggttttatcgtgttagttaggatggtttttattttttgattttatgaattatttattttggttttttaaagtgttgggattataggcgtgagttattttatttagtttttttgtagagatagggttttatgttgtttaggttggtttcgaatttttggttttaggttatttgttcgtttcggttttttaaagtgttgggattataagggttagttattatgtttagtttttataaaaattttaaaaattggcgagatgttatgtatatttgtagttttaattattaaggaagaaggatgattatttgagtttggggtatcgaggttgtagtgagttatgattatgttattgtattttagtttcggtgatagagtgagatttttttaaaaaaagttgggatttggtcggatatagtggtttatatttgtaattttagtattttgggaggttaaggcgggtggattataaggttaggagatggagattattttggttaatatggtgaatgaaattttatttttagtaaaaatataaaaaatttgttcggtgtggtggtgggcgtttgtagttttagttattcgggaggttgaggtaaaaggatgacgtgaattcgggaggcggagtttgtagtgagtcgagattatgttattgtattttagtttgggtgatagcgagattttgttttaaaaaaaaaaaaaaatgttgggattgaatttttgtttgttttggttattgaaatattttttgtgtttaagatagttttggtatgtagtaggtatttgaaaaatatttgaataagagagtgagaaataagaaataggtgtagagaattgaagttagtggtttaaggttatgggggtaggaattataaagttggggtttgaatttgggtagtatagtatttgagtttttttattttttttttttttttttttaagatagagttttgttttgttatttaggttggagtgtagtggtttgatttcggtttattgtagtttttgttttttaggtttaagtgatttttatgttttattttttcgagtagttggaattataggtatgcgttacgacgttgggtttttttttttttgagatggaattttatttttgttgtttaggttggagtgtaatgatgtaatttcggcggtttattataatttttgtattttagatttaagcgatttttttgtttcggttttttgagtagttgggattatagggatgcgttattatagatttcgggttaattttttttagtagagatagagttttattatgttgtttaggttggtttcgaatttttggttttaagtgattcgttcgttatgattttttaaagtgttgggattataggtatgagttcgtttcgtttttggttgtttttttatttttttattttttttttttttttttttttttttggagatggagttttattttgttatttaggttggagtgtagtggtacgattttggtttattgtaagtttcgttttttgggtttatattatttttttgttttagttttttaaatagttgggattataggtatttgttattacgtttggttgattttttgtatttttagtagagacggggttttatcgtgttagttagggtggtttcgattttttgatttcgtgattcgtttattttggtttttgggcgaggattataggcgtgatttattttatttggtttttttatttttttaattgtagtgttagcggtgttttttgttttttttgtagatgtaggtagtagaatatagtggttataggaatataggtggaaattttgtttaaagtaagggttatcgggtattatttttgattattttttttatttattttttaggttaagtttggtattatttttgataatttttttattattaacgatgaggtatacgttgaggagtttggtaacgagacgtggggcgtaataaaggtgaggtttggttttggttttgatgtcgggggcgggtagggttggtagggggtaaggttttgaggtgtgtgttttgtttgtaggtagtagagaaataaatgaaggataaataggacgaggagtagaggtttaaggaggaggaagaagataagaaacgtaaagaggaggaggaggtagaggataaggaggatgatgaggataaagatgaggatgaggaggatgaggaggataaggaggaagatgaggaggaagatgttttcggttaggttaaggacgagttgtagagaggtttgtttttagggttggattgaggtttgagcgtttttgtcgtagagtttgtcgcgttaaataatgtttttgtgagattcgagaatttttatttttttttaggttggttcggatttggggtggattttggttttgttttttttttttatttttttttatttttttttcgttttttttttttttttttttaaattggtattttatttttgatttttttttagtttttatttttggtttttattttttttgattaatatttttttttgtttttgttttttttttttattttttagtttttttttaatttggggggtagtggtgtggagaagttataggtttgagattttatttgtttttttttttggagtttagaggagggtagtagaagggggtggtgtttttaattttttagtattgaggaagaacggggttttttttattttattttttttttttttttttgtttttaggattgggttatttttgggtggggtagtgggttttagattggtttatattgagaatgtaagaattataaataaaatttttattaaattaaattttgtgttttttttttgtgtttttttttggggaaagatagatttaaggaaatttagtagtggtttttttggggggggggggggtttttagtatatttttttttttagttattgttagagaggttgttgagtgttttataagattttagggatttttatttattttataatttttaaaattaacgggggaatggttgttgttgttgtaaatattttatatattaatttattgaatttttgaatttaattggtaagttttggttttgtttatttatttatttttaagatagattttcgttttgttgtttaggttggcgtatagtggtttaatttggtttattttgttttttaaattggttttttttatgtttttatttttttggggttttgtggtttagtttaatttttttgggatgtttttaggattggtagatttaagggagaattttgtatttaatgtagtgaggttttgaaagttaatatttttaaatatttttggggttagattaggtatagtataataaagtatttttgttcggagatttaagaatgaaaattgtaggtttattttaaaattttagatttttaaagaatgaatgaggttataaaatggtattttgttttcgtttttaatttaaggttttttttttgtgtttggtggttttttaggtatttttagttttgagtaatttttattttgattgttttataagggtttttgttaggatatttagattagaataaaatttatttgggggtcgggtacggtggtttacgtttgtaattttagtattttgggaggtcgaggcgggtggattatttgaggttaggagttttgagattagtttggttaatacggtgaaatttaatataaaaaattattcgggcgtggtggggggtgtttgtaattttagttattcgggaggttgaggtaggagaattgtatgaattcggaaggcggaagttgtagtgagtcgagatcgcgttattgtattttagtttgggtgatagagattgtttgaaagaaaaaatttttatttggaagaggtaaaatgaggtttttatagaagaaatataaatgtttgtaattagtataggtatataaaaattttgttaaaaatttatttgagcgtgagagtggggatattagagttattttgtagtttcgtgacgttatcgataacgggtatggcgttatttaggagattacgtgtgcgggtcgagtaagaagtttcgtttatagcgcggagtttagtttgcgcgtatttcgttcgagaacgcgttcgtgcgtatgtttataaaggttaaggagggagtgcgtaggttacgtgcgtcggtggttagcgcgcgtattgtttgtttcggaagtggtcggcgcgcggcgcggcgcgtttgggcgttaagatggcggcggcgtgagttgtatgttgtgtgaggatttcggggtcgtcgcgtcgttcgggtttcgttatggtcgttattattacgtttaaaacgttgtagtagtagatttttaagattcgtatggagtttgacgagacggtgcgggtcgggtcggagttcgggggcgggagcgacgggtttcgggggtggggtgggggcggggaggttagaattttaacgggaggggtagggaggacggcgcgggtcggttttgtttagattttcgatttgttcgatttttttggatttttcgatggtttttggtttagtttttagtcgatcgggcggcgtttttgcgtcggttttcgggcgaggttttattttcggggcgttggttaggtttcggttttaatgttagcgttttcgcggggcgcgggagttataagttcggatttttgggtaggttaagttttttaagattgggttttacgtttttagttttgtaggcgtttttttgggatattggtggtcgaatttaggagtaatgattaggagatattgagtagtgacgataataacgatgttaatgataataaacgggttttagtttttataattttggtggttcgtgtttgttggtcgtttattttttattagttatcgagtgttgtagtgttgttttatcgttttgtaaaacgggtttgttattggggatttttgattattttatagatgtggaaatttagggattgaggaattttgttatagttatatataagtaatggtagagttgggatttaaattcggttttgtttcgtgtgagcgtttacgatataaatattatgttgtttttttagttaaaagtagaattaggatttaatttaaatatattgaatgtttattgggtatttggcgttttttgtatagtgagggagatattgaagtttattttttgtagaaaaggaaatatatattttttgattcgtttaagtgtttggttttgggtaagttaatttgtttatttgtttgtgttttcgtttttttaaatattaaatgaatcggtcgtttgttggttttcgtttgtaattttagtatttagggaggtagagggaagaggagtttttgagtttaggaattcgagattattttggtaatatagtgagatttcgttttttataaaaaaaagaaataaaaattaataaataaaatgagattaattaaacgtattttataggaaatttaaaaggtatgatatatatatatttatagtagtattattggttaggtacggtggtttatgtttttaattttgatgatttgggaggtagaggtaggaggattgtttgaggttaggagtttgagattagttagtttaatatagggagatttatttataaaaaaaaattatttttaattagtttggagtggtggtgtgtatttttagttttagttatttttaaggttggataagagtattagttgagtttaggagtttgaggttgtagttagcgatgatcgtgttatattaatttagtatgggcggtagcgagattttgttttttaaaattaaaaaatattattattaattattagttatttattgtttaaggtagagtgtagagtgggggattgttttttttattttgttaattatattttatattattcgaaattatattttttttatattagtgtttttttattgagagtagggatttatttgtgttgagtttgttttgtgttgtggtttttgtgtttaaaatagtatttggtatataatgggtgtttagtataagtaaatattgtgttgaatggtatgatgattgaatgaatttaaatttagtatgttttagatgttgagaaagtttaaaaaatttagcgtgtttgtttttttgttattagggttggtagtttttttgttttaaattagaagggaaaagagaattttggggtttttagtgattgtttgtattattttttttagg

SEQ ID NO: 72 - DNA, 6935 bp, Artificial Sequence
  chemically treated genomic DNA (Homo sapiens)
tttagagggagtggtatagatagttattggagattttaagattttttttttttttttagtttaggatagagaaattgttagttttgatggtagaaaggtaagtacgttgggttttttaagtttttttagtatttaaagtatgttagatttgaatttatttaattattatgttatttaatatagtatttatttatattaaatatttattatgtgttaggtgttgttttagatatagaggttatagtatagaataaatttaatataagtaagtttttgtttttaatgagagaatattaatgtgaagaaaatgtaatttcgggtagtataaagtataattaatagaataaaggggatagttttttattttatattttattttggataataagtgattaatagttaatagtgatattttttaattttaagaggtaggatttcgttgtcgtttatgttggattgatgtggtacgattatcgttgattgtagttttaaatttttgggtttaattggtatttttgtttagttttgggagtagttaggattaaaggtatatattattattttagattaattaaaaataatttttttttgtagataagtttttttatgttagattggttggttttaaatttttggttttaagtaatttttttgtttttgttttttaaattattaggattagaggtatgagttatcgtgtttggttaatagtgttattgtaaatgtatatgtgttatattttttaagttttttatgaaatacgtttaattggttttattttatttattgatttttgttttttttttttgtagagaacggggttttattgtgttgttaggatgatttcgaatttttaggtttaagggttttttttttttttgtttttttaagtgttgggattataggcggaagttagtaggcgatcggtttatttgatatttgagaaaacggaggtatagataggtaggtaggttaatttgtttaaagttaaatatttgagcggattaaaaaatgtgtgtttttttttttataaaaagtggattttaatgttttttttattatgtaaaaagcgttaagtatttaatagatatttagtatgtttgaattaggttttaattttatttttgattaaaaaggtagtataatatttatatcgtggacgtttatacgaggtagaatcgaatttgaattttagttttgttattatttgtgtgtgattgtggtaaagttttttaatttttaggtttttatatttgtaaaatgattagaggtttttaatgataagttcgttttgtagagcggtaaaataatattataatattcggtgattgataaaaagtaaacggttaataaatacggattattaaaattataaagattgagattcgtttattattattaatatcgttgttgtcgttattatttagtattttttggttattatttttagattcgattattagtgttttaaggagacgtttgtaaagttgggaacgtggagtttagttttggagagtttggtttgtttaggaattcgagtttgtgattttcgcgtttcgcgagagcgttgatattggagtcggggtttggttagcgtttcgggggtggggtttcgttcggagatcggcgtaggagcgtcgttcgatcggttgggggttgggttaaagattatcggggggtttaggaaagtcgggtaggtcgggggtttgggtagggtcgattcgcgtcgttttttttgtttttttcgttgggattttagttttttcgtttttattttattttcgaaattcgtcgttttcgttttcgggtttcggttcggttcgtatcgtttcgttaggttttatgcggattttgaaggtttgttgttgtagcgttttgagcgtgatggtgacggttatggcggggttcgagcgacgcggcggtttcgggatttttatataatatgtaatttacgtcgtcgttattttagcgtttaggcgcgtcgcgtcgcgcgtcgattattttcggggtaggtaatgcgcgcgttgattatcggcgtacgtgatttgcgtattttttttttggtttttgtgggtatgcgtacgagcgcgttttcgagcgaggtacgcgtagattaaatttcgcgttgtgggcggggttttttgttcggttcgtatacgtggttttttgagtgacgttatgttcgttatcggtgacgttacggggttgtaaagtgattttggtgtttttatttttacgtttaaatgaatttttaataaagtttttatgtatttgtattggttatagatatttgtattttttttgtaaaaattttattttgttttttttaaatgagaatttttttttttaaatagtttttgttatttaggttggagtgtagtggcgcgatttcggtttattgtagttttcgtttttcgggtttatgtaatttttttgttttagtttttcgagtaattgggattataggtattttttattacgttcggataattttttgtattgggttttatcgtgttggttaggttggttttaaaatttttgattttaggtgatttattcgtttcggttttttaaagtgttgggattataggcgtgaattatcgtattcggtttttaaatgagttttattttggtttgggtattttggtaggaatttttgtagagtagttaaagtgaaagttatttaaaattagaaatatttgaaaggttattaagtatagaaaaaaaattttaagttggaagcgggggtaaggtgttattttgtagttttatttattttttagggatttggagttttggaatgaatttataatttttatttttgggttttcgggtaggagtattttgttgtattatatttaatttgattttagaagtatttaaagatgttaatttttaaagttttattatattaaatatagaatttttttttggatttattagttttggaggtattttagaggggttgggttgagttataggattttaaaggaatagaagtatgaaaaaggttagtttaaggggtagggtgaattagattgagttattgtacgttagtttggataatagagcgagagtttattttaaaaataaataaataagtagaattaaaatttattagttaggtttaaggatttagtaagttagtatgtggagtatttatagtagtaatagttattttttcgttggttttgagggttatggggtaaataagggtttttggaattttgtggaatatttagtaatttttttagtaatagttgaaaaaggagatatattggaaattttttttttttttaaaaagattattgttgggtttttttaagtttgtttttttttagaaggagatataggggggagatataaaatttaatttaatagaaattttgtttgtagtttttatatttttagtgtgagttaatttgggatttattgttttatttagaagtggtttagttttgggggtaggggagaaagggaggggtgaaatgagaagagtttcgtttttttttagtgttggggggttggagatattatttttttttgttgtttttttttgggttttaggaaggagagtagatgaaattttaggtttgtggtttttttatattattgttttttaggttggaggggagttaagagatgagagaaggggatagaggtaagaaaagatgttgattaagaaagatgagaattaggggtgagggttgaaggagaattaaagataaaatattagtttaaaaaaaaaaaaaaaaagggcggggagggggtgggggagagtggaggaggggaataaaattaaaatttattttaaattcgaattagtttggaaaaaaatgaaagttttcgagttttatagagatattatttggcgcggtaagttttgcggtaggagcgtttaggttttagtttagttttggaggtaggtttttttatagttcgtttttggtttggtcggggatatttttttttttatttttttttttgttttttttattttttttatttttatttttgtttttattattttttttgttttttgttttttttttttttttgcgttttttgtttttttttttttttttaagtttttgtttttcgttttgtttgttttttatttgtttttttgttgtttgtaggtagagtatatattttagggttttgttttttgttagttttgttcgttttcgatattaggattaggattaggttttatttttgttacgttttacgtttcgttgttaaattttttagcgtatgttttatcgttggtgatgaggaagttgttaaagatggtgttagatttgatttggaggatgaatgggaaggatggttagaggtgatattcgatagtttttgttttggatagggtttttatttgtgtttttataattattatattttgttgtttgtatttgtagagaagataaggaatatcgttgatattgtagttaaaaagatggagaggttaggtgaggtggattacgtttgtaattttcgtttagaggttaaggtgggcggattacgaggttaggagatcgagattattttggttaatacggtgaaatttcgtttttattaaaaatataaaaaattagttaggcgtggtggtaagtgtttgtagttttagttatttgggaggttgagataggagaatgatgtgaatttaggaggcggagtttgtagtgagttaagatcgtgttattgtattttagtttgggtgatagagtgagattttatttttaaaaaaaaaaaaaaaaaaaaaaaagatggaaagatggagagatagttagggacgggacgggtttatgtttgtaattttagtattttgggaggttatggcgaacggattatttgaggttaggagttcgagattaatttgggtaatatagtgaaattttgtttttattaaaaaaaattagttcggggtttgtgatggcgtatttttgtaattttagttatttaggaggtcgaggtaggagaatcgtttgaatttgggatgtagaggttgtggtgagtcgtcgagattgtattattgtattttagtttgggtaataagagtgaaattttattttaaaaaaaaaaaagtttagcgtcgtggcgtatgtttgtaattttagttgttcgagaggatgaggtatgagaattatttgaatttggaaggtagaggttgtagtgagtcgagattaagttattgtattttaatttgggtgatagagtaagattttgttttaaaaaaaaaaaaaaaaaagatggagagatttaggtgttgtattgtttaggtttaaattttagttttgtggtttttatttttatgattttgggttattgattttagttttttgtatttgttttttgttttttatttttttatttaggtattttttaggtatttattatatgttagaattgttttgggtatagaaggtattttagtgattaaaatagataaaaatttagttttagtatttttttttttttttgggatagagtttcgttattatttaggttggagtgtaatggtatgatttcggtttattgtaagtttcgtttttcgggtttacgttatttttttgttttagtttttcgagtagttgggattataggcgtttattattatatcgggtaaattttttgtatttttattagagatggggttttatttattatgttagttaggatggtttttattttttgattttgtgatttattcgttttggttttttaaagtgttgggattataggtgtgagttattgtgttcggttaagttttaattttttttgagagggttttattttgttatcgaggttggagtgtagtgatataattatggtttattgtagtttcgatgttttaggtttaagtgattattttttttttttggtagttgggattataggtatgtatgatatttcgttaatttttaaagtttttgtagaggttaggtatggtggttaatttttgtaattttagtattttgggaggtcgaggcgggtagatgatttgaggttaggagttcgagattaatttgggtaatatgaagttttgtttttataaaaaggttgggtgaggtggtttacgtttgtaattttagtattttgggaggttaaggtgggtggtttatgaggttaggagatggagattattttggttaatacggtgaaattatgtttgtattaaaaaaaaaaatataaaaaaattagttaggtatggtggggggtgtttgtagttttagttattcgggattttgaggtagaagaatggagtgaatttggggggtcgtgcggagtttgtagtgagtagagattatattattgtattttagtttgggcgatagagtaaggtacggttttaaaaaaaaaaaaaaaaattagtttggtatttatagtagtatatgtttgtaattttagttatttcggaggttgaggtaggagaatcgtttgaaattaggagacggagggcgtagtgagttgagatcgtgttattgtattttagttttagtaataagagtgaaattttgttttaaaaaaaaaaattttttttgtagagatagggttttttcgttgtgttgttaagttaggttgagttgtgtaatttttggttttaagtaattttttgttttagttttttaaagtatcgtgattgtaagggtgagttattgtgtttagttttagttaattaattgggttatttgattattttttaggtttttgggggtaaagaagttgatttgtataaaagtatttggggaagtatttggtgtatagtaagtataattttaaaggggttgttgtgaggattttatagggatagattaggaagtattgtttataagaagtattatttttgagttagatttatttggggtgtttattttgtttttttttttttgggtgattttatgtatttgaggtattttagggatttttttttt

SEQ ID NO: 73 - DNA, 6280 bp, Artificial Sequence
  chemically treated genomic DNA (Homo sapiens)
ttttttgagataggattttgtttcgtagtttaggttggaatgtagtggtgtaattttggtttattgtaattttcgtttttcgtttttaggtgatttttttattttagttttttaagtagtagagattataggtgtgtgttattatatttggtaatttttattttttgtagagaaagggttttgttatgttgtttaggttggttttaagtttttggatttatgtattttgtttgtttcggttttttaaagtgttgggattataggtatgagttattgcgtttggttttgtagtatattttttattgtttttttagagtgtattttttttatttatataataaaagttaattataatatagttttaggtaggttttttaggaggtattttagaagaaggtattgttattataggatatgatagttttatgggtgttattgtttttgaggttttttagtttgataagatgtggaggtataagatggtgatattgatgattttaaaggtttaggttaatgtgtgttttttagtttttaataacgataaaaagtttaaaaagtaaaaaaataaaaaaagaaaaaaaatggttagaggtaatggttcgtgtttgtaattttagtattttgggaggttaaagtgggaggattttttgaggttaggagttcgagattgtagtgagttatgatgatgttattgttttttagtttatatgatagagtaaggttttgttttaaaaaaaaaaaaaaaaaaaaaaagtttatagaataaggatataaagaaaatattttttattttttatagttgtataatgtttgtattataagttgttattattagttaaaaagttaaaaaaaaattagaagtttataaagttatagtaagttaatttattattgaaaaaagaaatattttagagtagtttaggtgtgtagtgtttataaagtttatagtagtgtatagtaatattttagatttttatatttatatattagttatttattgatttatttagagtattttttagttttgaaatttttatttatgataagcgttttatataggtgtgttatttttaatttttttatattatttttttaattatattttttttatgtttagatatataagtatttattattgtgttataattatttatagtatttagtatagtaatacgttgtgtaggtttgtagtttaggagtaatatattatattatatatttaaggtgtgtagtaggttatattatttaggttgtatatgtatatttttcgatgtttgtataataatcgaattgtttaatgatatattttttagaataaatttttttattaagtgacgtatgattgtatttgtggaaatatattttttttttttttttttttgagatagaggtttattttgttgtttagtgtagtggcgttattttagtttattgtaatttttgtttttcgggtttaagcgatttttgtgttttagttttttaagtagttgggattataggtacgcgttattacgtttagttaatttttgtatttttagtagcgatggggttttattatattgtttaggttggtttcgaatttttgagttcgtgatttatttattttggttttttaaagtgttgggattataggtgtgagttattatatttagttggagaaatatatttttttatatatttagaaagtttttaagaatttaaaataatgtttatttttagggaggtgggaggaggatttttatttttaattaatttttttttttttatattggttttttttttttttttgttacgagtaaaaaaaaatttttttttttttgtatgtattaatatatgtaaaggtatttttttttttttttttttgtagatagtaatagttgtagtaggaaatttttaatattataattgtatagtatattttaaaatatttttatatttttttataattgttgtaaattataattaaaatgattttattatgtttttaaataatatgtatagagtatttatattgtgttagtttttttagataagaagatgtataggattgatttagtttttgttttatggagtttagaattgagttaggagttagttagtatatattattgagtatttattgtgttttaggtattgttgtaggtgaaaatagttatgaatacgagagttagtgtttttttttaaaaagtaagtggtttgtttagaaaaaaggtttaggttaggcgaggacgtttatgtttataattttagtattttgggaggttaaggtaggtagattataaggttagtagttttagattagtttggttaatatggtgaaattttatttttattaaaaatataaaattagttaggtatggtggcgggtatttgtaattttagttattcgggaggttgaggttggagaatcgtttgaatttgggaggtagaggttgtagtgagtcgagattgcgttattgtattttagtttgggcgatagtagagcgatattttattttaaaaaaagaaaaagaaaaaaggtttaatatatgtttaatatatattattaaattggttggagaagttttttttaaaaaagtaaaattggaattggaatttgaagatgaaaaggagttagttgtttaaagatttgggaagatagagttttaagttgaaggaattttaagtgtaaaggttttgaggttagaattagtttaatttgtttgagggttgaaagggaaatggatgatagtgaatgagtgggtgagagaaggaaagagatgaggttagagaaattggtaggagttagattatgtgggttttttaaggttacgtaaagagtttgatttttattttaaaatgtaatgagatattaagtatagatataatatgttttgatttatgggtttaaaaggttattttggttgttggggaggttgttgggggtaaagggtggaagcggagagattaggtgggacgtaggtgaaggataatgatggattagtttagggttgtagaagtagaaacggtgaaaaaaggttgatttggggatatatttggagaataaggttgatagggtttgataatgaattgtatgtggtggttgggagtgggtgagtgagggaatttgaagttattgaaaattagtagtgatattgtattagtgaggatgttgttttagagaagtaatttgtaattggttatagagttagtggtttgattagaattgtgttttatatttgaattaaattaaatgtgttataggtatagtataaaatagaggagaatagttgggagcgatggtttatatataattttagtattttgggatttcgaagtaggaggattatttgagtttaggagtttaagattagttttggtaatatagggagaatatatttgtataaaaaaataaaatattagttgggaagtagtggtgtgtgtttgtggttttagttatttaagaggttgaggtggaaggattttttgagtttaggaggttgacgttgtagtgagtcgtgtttgtgttatagcgttttagcgtggatgatagttagacgttttaaaaaaataagaataatttttaaaataaaaaataggggaatagtggtatattttgggatatagattttggagttattttgtttgaggttatattgtggatttgttatttattattggttgggttattttaggtgtattatttaatatttttgtattttagttttttatttgtaaacggattttttattaatagttaattgtttatagattgtttattatgattttatatataatatttaatttttttttttaataattaatgagtgatattattatttttattttattgttgaggatttagaagtatatttatttattttataaatatttatcgtgtatttgtaatgtgttaggtatgtttatgggtgaatatagtaaaatttttgtttttgtgtagttttagtttggggtttataggaaaaggagaaagatgataaataagagatacgtatattatagggtaattataaagggatattcgttatataagaaaatagagtaggataatagagataggaagttgggattttaagtaaggtagttagaatagattttattaagaaggtaatatttgagtaaggatgttaagggagtcgggggtaatttagaatttattagtggggagagtaaggcgattcggagaaaggcgaggggttaatgtattcgttttaataattttgattttaattcggggttagatggggaaatattggatagttttatttcgaggtgtgatagaatttgatttttattttaaatcggtttatttgtttaggttagtgagaaaaaataatatttgaattcgggtagtttagtttaggagtttgtgttgtcgggattaaagaattagtcgatatttttagggttgagtttcgtagtaagcgtttcgcgggtgttggtttttagattgtggttatcgttatttttttatttaaatttcgtttcgattattttttcgttttagggtttcgtatttattttgtcgggtttttacgaagcgtttttcgggttatatattgcgtaatttcggtagtcgggcggagtttgtatagaggcggagtcgcggtagtcggagagaacgttttagtaatagtcgttaggaggaagttttaggagtttttgtcgtttacggaacgcgtttgcgtaattcgggtttaggtcgtcgatattttaggatcgtttttcgtttcgtttttaattttggggcggagttttcggtcgcgtcggcgtaaagcgtcgtcgtattttacgtttgcgcgtttcgttcgttcggttttatttttttaggtttttcgcgtgggggagggggtacgtttcggcgagttacgatgatggcggttattattttgtggtgagttagcggattttttgtttgtttcgtcgattttttcgcgttttttgtagatttcgtggttggcgttcggcgcgtgaggaagtacggcggttcgagttcgcggggaaggtcgtagtcgcggaggtagcggcgcggttcggggtacgggttgggggagaggtcgtttcgttgggcgaatgtgataagtttttatttttatcgtttttttttttagagcgcgaggagcgcgggcgatttcggggtttcgttaggttatagatttcgtttagcggttagtattcggcgtaggttcggtagtcgagttgcgcggcggtattatgtaggttattttgaagattttttagtagtagatttttaagatagatattgatttcgaggagacggtatgcgcgcgggtcgggggtaggggtagtcgcgtgcgggtcgcggggagcgttaggagttcgtggggtcgggcggcgcgttttagcgggggaagtttcggagggcgcgatgagggttttgggttttggtgtcggttttggcggcgtatagcggagtcgatttttttgttttggtcgtgggttttgtggtaggagaatggggaagtagtggtcggacgtcgaaggtttggtggtagatggcgtggagcgtacgttcgcgggtttgggtttaggagttcgtgttagcggggtcggagggggatgggaaggtttaggtcgttttagtcgtagagtttggttttttggtatgggtgtataggtgggggagggagacgtaggcgtcgttattatttttgtgtggatttggttagtcgtttagtttttagagttggtaattcgagaagatgagttttaagaaaaaaaaaagtattaggtttcgtttgtcgtcgagaggtgagtggtggtgaaaatgaatttgtttttttttttttagaattgtttatttttttatttgtaaatgaatcgttttgttgtttttttttcgttattaaatttatatttttgcgtagattgtattttgaggtttttttggtgatggttttagttgttagagttttttatagttatttaggtttaaattaaattttagatttaacgggttttttgtgttagaaattttggaattgtaggagttggaacgttgtagttattttttttcgatgttttaaatagtagtagtttaagggggaaaaaagaaaaaaaaaataaaaaataataattttgaattttttttgtagttaaagttttaaatattttagaagtttatattatatatttttttgtatttgtgattgtataaagagatattgttgaggttagtataattttatgttaagaatttaaaaacgttgtgagtgtaaatttattgtttatgttcggaaatatatcgttaagattgtta

SEQ ID NO: 74 - DNA, 6280 bp, Artificial Sequence
  chemically treated genomic DNA (Homo sapiens)
tgataattttggcggtgtattttcgaatataagtagtaaatttatatttatagcgtttttagatttttggtataaagttgtattgattttaatagtgtttttttatgtagttataaatatagaaaaatgtataatgtggatttttgaaatgtttaaggttttaattgtagaaaggatttaaagttgttgttttttgttttttttttttttttttttttttgaattgttattgtttggggtatcgggggagggtggttgtagcgttttaatttttataattttaagatttttaatatagaaaattcgttaaatttgaagtttagtttgagtttggatggttgtgaagagttttaatagttaaaattattattaaagaggttttaaagtgtaatttacgtaagggtgtgggtttggtggcgggaggaaggtagtagaacgatttatttgtaaataaaagggtaaataattttgaggggaaaggggtaaatttatttttattattatttatttttcggcggtaaacggaatttgatattttttttttttttaaggtttattttttcgggttattaattttgggaattaagcggttaattaggtttatataggggtagtggcgacgtttacgttttttttttttatttgtgtatttatattagaaagttaggttttacggttgagacggtttggatttttttattttttttcggtttcgttagtacgagtttttaggtttaggttcgcgggcgtgcgttttacgttatttgttattaggttttcggcgttcggttattgtttttttatttttttgttataaagtttacggttaagataggaggatcggtttcgttgtacgtcgttagggtcggtattaggatttagggtttttatcgcgtttttcggggtttttttcgttggagcgcgtcgttcggttttacgagtttttggcgtttttcgcggttcgtacgcggttgtttttgttttcggttcgcgcgtatatcgttttttcggggttaatgtttattttgaaggtttgttgttggagggtttttagggtgatttgtatggtgtcgtcgcgtagttcggttgtcgggtttgcgtcgggtgttggtcgttgggcggggtttgtggtttggcggggtttcggggtcgttcgcgtttttcgcgttttggggaggaaggcggtgggggtgggggtttgttatattcgtttagcggagcggttttttttttagttcgtgtttcggatcgcgtcgttgttttcgcgattgcggtttttttcgcgaattcgggtcgtcgtgtttttttacgcgtcgagcgttagttacggagtttgtagaaggcgcgagggggtcggcgagataagtagggaattcgttagtttattataggatggtggtcgttattatcgtgattcgtcgagacgtgtttttttttttacgcgaaaaatttggggggatggggtcgggcgggcgaagcgcgtaggcgtggggtgcggcgacgttttgcgtcggcgcggtcgaggatttcgttttagaattgggggcggggcggaaggcggttttggaatgtcggcggtttggattcggattacgtaggcgcgtttcgtgggcggtaagggtttttggggtttttttttagcgattattgttggggcgtttttttcggttgtcgcggtttcgtttttgtgtaggtttcgttcggttgtcgaagttacgtaatgtgtagttcgggaagcgtttcgtggagattcggtagagtggatgcggagttttggagcgggggagtaatcggggcggagtttaagtgaaaggatggcggtaattatagtttgggggttagtattcgcggggcgtttgttgcggggtttagttttgggggtgtcgattgattttttaatttcgatagtatagatttttgagttggattgttcgagtttaaatattgtttttttttattagtttaaatagatggatcgatttaaaatgaaggttaagttttgttatatttcggggtagaattgtttagtgtttttttatttagtttcgagttaaagttagagttattagaacggatgtattagtttttcgttttttttcgagtcgttttattttttttattggtggattttaggttgttttcggtttttttaatatttttgtttagatattgtttttttggtgaggtttgttttggttgttttatttaaaattttaattttttatttttgttattttgttttgtttttttgtatagcgggtatttttttataattattttgtaatgtacgtattttttgtttattattttttttttttttttgtgaattttagattgaagttgtatagaggtaaagattttgttgtgtttatttatgaatatgtttggtatattgtaggtgtacggtaaatatttgtggaatgggtgaatgtgtttttggatttttagtagtagaatgagaataataatgttatttattgattattggagggggaagttgaatattgtatgtaaaattatgataaatagtttgtaagtagttagttattagtagaaagttcgtttatagatagaaaattgaagtatagagatgttgagtaatgtatttggaataatttagttagtagtaaatggtaaatttataatgtgattttagatagaatgattttagagtttgtgttttagggtgtgttattatttttttgttttttgttttaaagattatttttatttttttaaagcgtttgattgttatttacgttggagcgttgtagtataaatacggtttattgtagcgttaattttttgagtttaagagatttttttattttagttttttgagtagttgggattatagatatatattattgttttttagttgatattttatttttttgtatagatatgttttttttatgttgttagggttggttttgaatttttgggtttaagtaatttttttgtttcggagttttaaagtgttgggattatatgtgagttatcgtttttagttatttttttttgttttatattgtgtttgtggtatatttgatttagtttaagtataaaatatagttttagttaggttattagttttatgattaattataaattatttttttgggatagtatttttattaatataatgttattgttaatttttagtggttttaagtttttttatttatttatttttaattattatatgtaatttattattaagttttgttaattttattttttaagtatatttttaagttagtttttttttatcgtttttatttttatagttttaagttaatttattattattttttatttgcgttttatttggttttttcgtttttattttttatttttaatagtttttttagtagttagagtggttttttaaatttataaattagagtatgttgtatttatgtttagtattttattatattttagaataaaagttaaattttttacgtggttttggagagtttatatgatttgatttttgttagtttttttgattttattttttttttttttttatttatttatttattgttatttattttttttttaatttttaaataggttaagttggttttagttttagggtttttgtatttgaggtttttttagtttgaaattttatttttttagatttttgaataattaatttttttttatttttaggttttaattttaattttatttttttagagaggatttttttaattaatttaataatatatattaaatatgtgttaagttttttttttttttttttttttgagatggagtatcgttttgttgtcgtttaggttggagtgtagtggcgtaatttcggtttattgtaatttttgttttttaggtttaagcgattttttagttttagtttttcgagtagttgggattataggtgttcgttattatgtttggttaattttgtatttttagtagagatggggttttattatattggttaggttggtttggaattattgattttgtgatttgtttgttttggttttttaaagtgttgggattataggtatgagcgttttcgtttgatttaagttttttttttaggtaagttatttattttttagggagagatattgattttcgtatttatgattgtttttatttataatagtgtttagaatatagtaggtgtttaatagtgtatgttgattgatttttaatttagttttaaattttatgagataggggttgagttagttttgtgtatttttttatttgaaggagttagtataatgtggatattttatatatgttgtttgaaagtatggtaaggttattttagttataatttataatagttgtaagaaaatgtgaaaatattttaaaatatgttgtatagttgtaatattaaaagttttttgttataattgttattgtttgtagaaaaaaaaggagagagatgtttttatatatattagtgtatgtaaaaaaaaaaaagtttttttttgttcgtggtaaaaggaaaaaaaaagttaatgtagaaagggagggattgattgaaaataaaagttttttttttatttttttagaagtaagtattgttttgagtttttagaaattttttagatatataaaagaatatatttttttagttgggtgtggtggtttatatttgtaattttagtattttgggaggttaagatgggtgaattacgagtttaggagttcgagattagtttgggtaatatggtgaaattttatcgttattaaaaatataaaagttagttgggcgtggtggcgcgtgtttgtagttttagttatttgggaggttgaggtataagaatcgtttgaattcgggaggtagaggttgtagtgagttgagatagcgttattgtattgggtaatagggtgagtttttgttttaaaaaaaaaaaaaaaaagaatatgtttttataaatatagttatgcgttatttaatgaagaaatttgttttgagaagtgtgttattaggtaattcggttgttgtgtaaatatcggagaatgtatatatatagtttaggtggtatagtttattatatattttggatatatggtataatgtattgtttttgggttataaatttgtatagcgtgttattgtattgagtattgtagataattgtaatataatggtaagtatttgtgtatttaaatatagaaaaggtatggttaaaaaagtggtataaaaagattaaaaatggtatatttgtgtagggcgtttattatgaatggagattttaggattggaaaatgttttgggtgaattagtgagtgattggtgtgtgaatgtgaaagtttagagtgttattgtatattattatagattttataaatattgtatatttaggttattttaaagtgtttttttttttaataataaattagtttgttgtaattttatgaatttttaatttttttttaattttttgattggtaataatagtttataatataaatattgtatagttataaaaaataaaaaatattttttttatatttttattttataagttttttttttttttttttttttttgagataggattttgttttgttatgtaggttggagggtagtggtattattatagtttattgtagtttcgaatttttggttttaagagatttttttattttagttttttaaaatgttaggattataagtacgagttattgtttttggttattttttttttttttttgtttttttattttttaaattttttgtcgttgttaagaattaagaaatatatattagtttaagtttttaggattattaatattattattttgtatttttatattttgttaaattgaagggttttaagggtagtaatatttatggagttgttatgttttatgataataatgtttttttttggaatattttttgaaggatttgtttgaggttgtattatagttaatttttgttatataggtggaaggagtatattttaaaagaataataaaaaatatattataaggttaggcgtagtggtttatgtttgtaattttagtattttgggaggtcgagataggtagaatgtatgagtttaggagtttgagattagtttgggtaatatggtaagattttttttttataaaaaataaaaattgttaagtgtggtggtatatatttgtagtttttgttatttgggaggttgaggtgggaggattatttgaggacgggaagcggaggttgtagtgagttaagattgtattattgtattttagtttaggttacggagtaagattttgttttaaaaaa

SEQ ID NO: 75 - DNA, 8537 bp, Artificial Sequence
  chemically treated genomic DNA (Homo sapiens)
ttggattacggtatttgtaagtttaatggatgtgaaattgattgaattttaagaaattatagtaaattatatttagttgaattttggggaaatatatttgtagaaagatgtttatttatttataatgtatgtttgttattttaggatttttattttgtaagtatattagaggaggtgaattaggagtagattagattatttgatatatattattttatatataaagaatatatatatatgtatgtgtgtgtgtatgtatttttatatatatatatttatatatatgtatttatattttttttttttttttttttgagataaagttttattttttcgtttagattggagtgtagtggtgtaaggtgtaattatagtttattgtaattttgaatttttgggtttaagtaattttttttttttagttttttagatagttaggattataagtgtgtattatcgtatttggttaatttttaaaaaaaggttttttttggttaggcgcggtggtttacgtttgtaattttagtattttgggaggtcgaggcggattatgaggtttggagttcgagattattttggttaatatggtgaaattttatttttattaaaaatataaaaaatgagtcgggcgtggtggtatgtgtttgtagttttagttattcgggaggttgaggtaggagtatcgtttgaatttgggaggtcgaggttgtagtgagtttagattttattattgtattttagtttggcgatagatcgagattttattttaaaataaaaatataaaaaaaataaaataatatttttttttgtagagttggggggttttattatattgtttagattagtttttaatttttggttttaaatggtttttttattttagttttttaatgtattaggattataagtgtgagttattatattttaaaattttttaattaatatatttataaatatttttagagaatgttaatttaattattagagggaaatttagtttgttttatttttaagtttttagtgggttgttttggaagaaaggaatagaaattatttaaattagtttaattaataaaaatagaaggtagagttattggaatgtagggatattttataatttaagagtattaatttttaagagtttaaggttttttttaaaaaaaaaaaaaaaaagtaaaaaagaatttaagagtaggaggagtaagtattgttaggtttttgagaaattggaaaggcgatttggaaaggagttagaatttaaatggtttatttatttttgattttttttttagtattttaatttttttttttttttttttttttttttttttttgagatagagttttgttttgttatttaggttggagtgtagtggtacgattttagtttattgtaatttttgttttttagttttatgcgatttttttgttttggttttttgcgtagttggaggttaatgtttgtatttttagtagagatggggttttattatgttggttaggttggtttcgaatttttgattttaggtgatgcgtttgttttagttttcgaaagtgttgggattataggtttgagttattatattcgatattaattttttaatttttttgtagatgtgttttttttgattggatatttatatatatttatttgtgtattttgttttataaatttttgaggttagatttgaatataaagttaagtttaattttttaggagtaggaaaatgattggttaatttggggttagatgaatattgttggtataattggtggttagaaaggtaaaagttatgtgattatagttagttaggaggagggttgtaggtttgtagatgttttaagggtgtgggaagaatcggaggtaaaggtgtgtaattttgatatggaagaaagtttattattattataggtagtatttataattattaagttaggttgtttttatatttagaaagttgtttgagtttgttttttttgttatttttttaatttagaggattttaacgttttaatatagatttgtcgtttattaggaattgggttgtatagtaggtgagtagttagtaagtaagtattattgtttgagttttgttttttgttagattaaggagagtattagatttttataggaatttaaaatttattttgaattgtatttgtgaggaatttagattgtatattttttatggaaatttaattgatgattttgaggtgtaatagttttatttcgaaattattttttgttttatgtttatttttcgagttttgtggaaaattgttttttatagaatagttttttggtgttaaaaaggtagaattggaatttaatttaaatttttatttttttgttgaaatattgtaagaattttttttttggtgtttttatttttacgtttttgaaatttgttttttaacgttataaggtaatagtgtgaggattaattaaaaattttgttaattttaaagtattttataaatataaagtagtaataaggttattgtaatggtttatatttgtaattttaatattttgggaggttaaggtgggaggattatttgaggttaggagtttaaggttaatttgaatagagcgagatgttgttttaaaaataaaaaaataaggtcgggtgcggtggtttatatttgtaattttagtattttgggaggttacggtaggtggattatttgaggttaggagttcgagattagtttggttaatatggtgaaattttgtttttattaaaaatataaaaaattagttgggcgtggtggtaggcgtttgtaattttagttatttgggaggttgaggtaggaagattcgtttgaatttgggaggtggggttgtagtgagttgatattacgtttttgtattttagtttgggtaatagagtaagattttatttaaaataaataaataaataaataaataaaaataaaaataaattggtaagtggagggaaaatagatttaattaaatgatttgtttttttaaaaattttaatgatttttttagtatttagagattaaagttttttatttttttttttttttttgagacggagttttgttttgttgtttaggttggagtgtagtggcgtgatttcgtttattgtaatttttatttttcgggtttaagtatttttttgttttagttttttaaagagttgggattataggtatgtattattacgttcggttaatttttgtagttttagtagagatggggttttgttattttggttaggttggttttgaatttttgatttcgtgattcgtttattttggttttttaaagttttgggattataggtttgagttatcgcgtttggtttttttttatatgttttgttgttgtcgtttgttttttgagataaggttttattttgtagtttaggttggagtgtagtggtttattatagtttattgtagttttgacgttttgagtttaagtagtttttttattttagttttcgggatagttgagattataggtataagttattacgtttagtttattttattttatttttttttgagatatggggttttattatgttgtttaggttggtttttaatttttgagtttaagcgatttttttttattttggttttttaaagtgttgggattataggtgtgagttatcgtgtaggttttatatgatttttatattttgaattaaatgtaattttttagtttcggtatttgttttggtattttttttttttcgttagataatattaatttttaattatgtagttcgtttttatgtttatattattttatttgtttataatgttttttatttcgtttaagaaattttatttagttagtttgtggtgttgttttgatatagtttcgttttgtcgtttaggttggagtatagcggcgagatttcggttggttgtaatttttttttgagtttaagcgatttttatgttttagtttttcgagtagttaggattataggtatgtgttataaaatttggttaatttttgtattttttattaaagacgaggttttattacgttggttaggtttatttttaatttttgattttaggtgattcgtttgttttggttttttaaattgttgggattattggcgtgaattatcgcgttcggttttatttagtttttaaaatcggaattacgggttaaaattttttggtaaattacgatacggtttaggttatgaaatttaatgttttttttttttgaatttttgtaaatttttagtaaagtattatagattgacgaatattttagttatttttttttttcgtacgttagttttattttttatttttatttattttttcgagtttttttagtttttttatttttatgaggtttggaaagtattttgttttaggaatgcgagtaggaggtttagagcgattagaagtgttaaaagttgatatttagatattgtcgaaataaattataagagcgttagggttttcgttaatagtttagttgcgatggtgagaattcgcggattcgtcggcgatgtatgtcgggagatgtagtttcgggtcgacgtattattttttgggagtcgtggttttcgatttggtaaatagaagacggtaattcggttaagtttttttttatcgttttttgaaatttttcgttttattcgcgagggattggggtaggagtaggggcgttgtcgtggttagtttcgaatttttaggtttagacgatattttcgtttcggtttttcgagtagttgggattatacgcgtgagttatcgttttcggtataaagtttgaattagtttttacgtaaaaagggaagagggtagtttgtaaattcgcgtaggattaagttttcgagttttcgttttgggttagcgcgtagggcggaagcggggagaaggcggattcgggaggcggggatacgttacgtcgacgcgggcgtgattttgggcgagagggtttggcgggaattttgaaagtcgttggcggatcgcgcgtagcggttagagatcgagttttaaggagagtgcggcgtttttcgaggcgtgtagttgggaattgtaatttatttgggttgtgcgtagaaggttggggtaagcgagtagagaagtggagcgtaagttaggggcgttgggggtcgtgcgggtcgggcgcgtgttacgttcgcggggtgaagtcggagcgcggggtttgttggagagaggagcgttgcggatcgaggtgagtgtgtgaggcgtaggttgggttttttagagtcgcggttcgttttcgtttatttgcgttttggtcggtttagtgtttagcggtagttggggttttcgcgcgtagtgtgaaattcggacgtggtagggcgtgttcgcgttcgatcgatttttagttgttggggcgaaaatataagtggattttagtttttagaattaggggagaaatattagagtttttataggtaatatttattttatgggttcgagcgagaagttcgagattagagcggtgtagttatagttgtttaatattatagttagggttttcggatttttgatttgtttttttattatatcgtgtttagaaagtattaattttcgattgttaaaatagtgtttttattatttaatgcggaaaattatttatatgatgtttagagaatgatttgaagtgaggtttggtttttttaaaattttttttttgagatggagtttcgttttttcgtttaggttggagtgtagtggcgcgatttcggtttattgtaattttcgtttttcggatttaagcgatttttttattttagtttttcgaggagttgggattataggtttttattattacgtcgttaggttgatttttgtatttttagtagagacggggttttattatgttggttaggttggtttcgaatttttgattttaggttatttattcgtttttgttttttaaagtgttgggattatagtcgtgagttatagcgtttggtttttgtttttttgtttgtttgtttgtttttaatttttaaagcgaaatgtaatatatatgtagaaaaatttatatttataattgtatataatttcgtgaattattataaaatatattggtcgggcgtcgtgttttacgtttgtagttttagtattttgggaagtggaggcgggaggacgattgagtttaagagttcgagaatagtttggttaagatagtgagattcgtatttttataaataggaaaaattagttaggtatggtggcgtgtatttgtaggtttagttatttaggaggttgagaagggaggatttagtttgggaggtataagttgtagtgagttgtgattaggttattgtattttaatttgggcgatagagtaagataaaatgaatatatatttatgtaattattatttaatagaatggtttttagaagtttttttgtgtagtatttaatatttttttttttttatagtggtaattgttatattggtttttaatgagatgaattaatgttgtttgtttttgaattttatataaaaatatattaggagtgttgagtgtttcgttgttttatatgtttgttaatacgatattttttagtttttttgattttaattattttgttggttatatagtaatgttttaatgtgattttaatttttttgattaataatgatgttggatatttgtttatatgtttttgtttattttgatattttttgtgatgtgtttgtttaaattttttgtttatttttttattattttttttttattgatgtgaagttttttatatattggttattagtttttagttatgtttgtgttaaatgttttttttattgtggtttgatttgttatttttttagtggtgttttttgatgaatagaagtgttgaatttatttttttattatttatttatttatttatttttttttttgagatagagtttggtttttgttgtttaggttggagtgtaatggtataattttggtttatcgtaattttcgttttttgggtttaagcgatttttttgttttagtttttcgagtagttgggattataggtatgtgttattacgtttagttaattttgtatttttttttaatagagataggatttttttatgttggttaggttggttttgaatttttgaatttaggtgatttgttcgttttggttttttaaagtgttgggattgtagacgtgagttatagtgtttagtagaagtgttgaatttaaatgtagtttagtttttagtttttttttttttggttagtgcgttatgtatttagttttaagaaatttttttttgttttaaggttgtgaaaataataagtgttattttgtttttgatagacgattgtatatatttatgagatataagatgatatttttttttttttttttttttttttgagacggagttttattttgtcgtttaggttggagtgtagtggcgcgattttggtttattgtaagtttcgttttttgggtttacgttatttttttgttttagtttgttattacgtttagttaattttttgtattttttagtagagatagggttttattatgttagttaggatggtttcgattttttgatttggtgatttattcgttttggttttttaaagtgttgggattataggcgtgagttattttatttggtttaagatgatattttaatatatatatatattgtataatgaatgattaaattagggtaattagtatatttattagtttatttaaatatttgttatttttttttgtgatgagaatatttaaaatattcgtttttggttattttgaagtatatattatattagtgtttattgtagttattttattgtgaaatagaattttagaatttattttttttatttaattgaaattttgtgtttgttgattaattttttttttttttgtcgttttttgtaatagttgtattttttttagtttttggttattattgttttatttgttttttgtatgagatgaatttttttttttttgtttttttttttgagatatagttttattttgttatgaggttggagtatagtggtacgatttcggtttattgcgatttttgtttttcgggttgaagttatttatttgttttagtttttcgagtagttgggattataggcgtgtgttattatattttgttaatatttgtatttttagtagggacggggtttcgtatgttggtcgggatggttttgattttttgatttggtgatttgttcgtttcggttttttaaagtgttgggattataggtatgagttatcgcgtttcgttaagattaatttttttagattttatatatgagtgagattatgtagtatttgtttgtaaatatatttataatgtataatggggtatataaaaataagtaaaatttggtttttatattgaaggaatataaagtaggagaatagagaggtataataagagaatggttttggttttttttaaagtttttttgatacgattagttagatagaagatggggagagagatgtattttatttttttagtgtttatattgataagtatttgtattttttagt

SEQ ID NO: 76 - DNA, 8537 bp, Artificial Sequence
  chemically treated genomic DNA (Homo sapiens)
attgaaaaatataaatgtttattagtataaatattagagaaataaggtgtatttttttttttattttttatttagttagtcgtattaaaaagattttaggaaaagttaaggttatttttttattgtgtttttttgtttttttgttttatatttttttagtgtaggggttaagttttatttatttttatatattttattatatattataaatgtgtttgtagataaatattgtatgattttatttatatgtagaatttaaaaaagttgattttggcggggcgcggtggtttatgtttgtgattttagtattttgggaggtcgaggcgggtagattattaggttaggagattaagattatttcggttaatatgcgaaatttcgtttttattaaaaatataaatattagtagggtgtggtggtatacgtttgtagttttagttattcgggaggttgaggtaggtaaatggttttaattcggaagatagagatcgtagtgagtcgagatcgtgttattgtattttagttttatgatagagtgagattgtgttttaaaaaaaaaaataaaaaaaaaaaagtttattttatataaggaataaatagaatagtggtaattagagattgaggagaatgtagttgttgtagggggcggtaggaaggagagaggttggttaataggtataaagttttagttagataggaggaataagttttagggttttattttatagtagggtgattatagtaaatattaatgtaatgtatattttaaaatagttagaagcgagtattttgaatgtttttattataaagagaaatgataagtgtttaagtgaattgatggatatgttgattattttgatttgattatttattatataatgtatatatgtattgaaatattattttgggttaggtggagtggtttacgtttgtaattttagtattttgggaggttaaggcgggtggattattaggttaggagatcgagattattttggttaatatggtgaaattttgtttttattaaaaaatataaaaaattagttgggcgtggtggtaggttgagataggagaatggcgtgaatttaggaggcggagtttgtagtgagttaagatcgcgttattgtattttagtttgggcgatagagtgagatttcgttttaaaaaaaaaaaaaaaaaaaaagaaatattattttgtattttataaatatgtataatcgtttgttaaaaataaagtaatatttattatttttataattttgggatagaaaaagattttttgaaattggatgtataacgtattagttaaaaaggaaaagattgaaaattgaattatatttaaatttagtatttttattgggtattgtggtttacgtttgtaattttagtattttgggaggttaaggcgggtagattatttaagtttaggagtttaagattagtttgattaatatggagaaattttgtttttattaaagaaaaatataaaattagttgggcgtggtggtatatgtttgtaattttagttattcgggaggttgaggtaggagaatcgtttgaatttaggaggcggaggttgcggtgagttaagattgtgttattgtattttagtttgggtaataagagttaaattttgttttaaaaggaaaaataaataaataaataaataataaaaaaataaatttagtatttttatttattaaaggatattattaagagagtgataagttaaattatagtagagaaaatatttagtataaatataattgagggttgataattagtatataaagaattttatattagtaagaaaaagataatagaaaaataggtaagagatttgaataagtatattatagaagatattaaaatgggtaaaaatatatgaatagatgtttaatattattattaattaggaaaattaaaattatattgagatattattgtgtaattagtagaatagttaaaattaaaaaggttgaaaaatatcgtgttggtaagtatgtgaaataacgaaatatttaatatttttgatgtatttttatataaaatttaaaaataagtaatattagtttattttattagaaattagtatagtagttattattgtaaaaaggggaaaatattaaatattatataggaaggtttttgaggattattttattaagtggtgattatataggtgtatatttattttgttttgttttatcgtttaggttggagtgtagtggtttgattatagtttattgtagtttatattttttaggttagattttttttttttagttttttgaatagttgggtttataggtgtacgttattatgtttagttaattttttttatttgtagagatgcgggttttattattttgattaggttgttttcgaatttttgggtttaatcgttttttcgtttttattttttaaagtgttgggattatagacgtgagatacgacgttcggttagtatattttgtaataatttacggagttgtatatagttgtgaatgtgaatttttttatatgtatattatatttcgttttagaagttaaaaataaataaataaataaaaaaataggggttaggcgttgtggtttacggttgtaattttagtattttgggaggtagaggcgggtggataatttgaggttagaagttcgagattagtttgattaatatggtgaaatttcgtttttattaaaaatataaaaattagtttggcggcgtggtggtgggggtttgtaattttagtttttcgggaggttgaggtaggagaatcgtttgaattcgggaggcggaggttgtagtgagtcgagatcgcgttattatattttagtttgggcggaagagcgagattttattttaaaaaaaaagttttaagaaaattaaattttattttagattattttttaggtattatgtgaatggtttttcgtattagatgatgaaaatattgttttggtaatcggagattggtattttttaagtacggtgtaatggaaagatagattaggaattcggaagttttggttgtgatattaaatagttgtggttatatcgttttgatttcggatttttcgttcgaatttataaaataggtgttgtttataaaggttttaatgttttttttttagttttaaagattgaggtttatttgtgttttcgttttagtagttgagggtcggtcgggcgcggatacgttttgttacgttcgggttttatattgcgcgcggaggttttaattgtcgttgagtattggatcggttaggacgtaggtgggcgaggacgagtcgcggttttggagggtttagtttgcgttttatatatttatttcggttcgtagcgtttttttttttagtaggtttcgcgtttcgattttatttcgcgggcgtggtacgcgttcgattcgtacggtttttaacgtttttggtttacgttttatttttttattcgtttgttttagttttttgcgtataatttagatgagttgtagtttttagttgtacgtttcgggaagcgtcgtattttttttagggttcggtttttggtcgttgcgcgcggttcgttagcggtttttagaattttcgttaaattttttcgtttagggttacgttcgcgtcgacgtaacgtattttcgtttttcggattcgtttttttttcgttttcgttttgcgcgttaatttaagacgggagttcgagagtttgattttgcgcgagtttatagattgtttttttttttttttgcgtaaggattaatttaaattttatgtcgggggcggtggtttacgcgtgtagttttagttgttcgggaggtcgaggcgagagtatcgtttgagtttaggagttcgaggttaattacggtaacgtttttatttttattttagtttttcgcgggtggggcgagggattttagggggcggtgggggaagatttaatcgagttgtcgttttttgtttattagatcgaagattacgatttttaagaggtaatgcgtcggttcgggattatatttttcggtatgtatcgtcggcgggttcgcgagtttttattatcgtagttggattattagcgggggttttagcgtttttgtggtttgtttcggtagtatttgaatgttagtttttggtatttttggtcgttttgagttttttattcgtatttttggagtaaggtgttttttaggttttatggaggtggaggagttgaggaagttcgagaagatggatagaagtgggaaatggagttagcgtacgggagagggaaatggttggaatattcgttaatttgtggtgttttattggagatttgtaggagtttagaggaagggggtattgaattttataatttaaatcgtatcgtggtttattagaaagttttgattcgtgatttcggttttaaaggttgagtagggtcgggcgcggtggtttacgttagtaattttagtagtttaggaggttaaggtaggcggattatttgaggttaggggttggagataaatttggttaacgtggtgaaatttcgtttttagtaaaaaatataaaaattagttaggttttgtggtatatgtttgtaattttagttattcgaaaggttgaggtatgagaatcgtttgaatttaggaggaggttgtagttaatcgagatttcgtcgttgtattttagtttgggcgatagagcgagattgtgttaaaataatattataagttagttgagtagggttttttgggcgaagtggaagatattataagtaaatagggtagtatgggtatggaaacgaattatatgattaaagattagtattatttggcgagggaggaaaagtgttagagtaagtgtcgaaattggaaggttatatttagtttaggatatgaagattatataaggtttgtacggtggtttatatttgtaattttagtattttgggaagttaaggtgggggaggatcgtttgagtttaggagttggagattagtttgggtaatatagtgggattttatattttaaaaaaaaataaaataaaataagttgggcgtggtggtttgtgtttgtggttttagttatttcggaggttgaggtgggaggattgtttgagtttaggacgttaaggttgtagtgagttatgatgggttattgtattttagtttgggttatagagtgagattttgttttaaaagataagcgataataataaaatatgtaaggagaggttaggcgcggtggtttaagtttgtaattttagaattttgggaggttaaggtgggcggattacgaggttaggagtttaagattagtttggttaagatggtaaaattttatttttattaaaattataaaaattagtcgggcgtggtggtgtatgtttgtaattttagttttttgggaggttgaggtagagaagtgtttgaattcgggaggtggaggttgtagtgagcgagattacgttattgtattttagtttgggtaatagagtaagatttcgttttaaaaaaaaaaaaaaaggtaaggagttttggtttttaggtattgaagaaattattgaagtttttaagaagataagttatttggttagatttattttttttttatttattaatttatttttatttttatttatttatttatttatttattttagatggagttttgttttgttgtttaggttggagtgtagggacgtggtattagtttattgtaattttattttttagatttaagcgagtttttttgttttagttttttaagtaattgggattataggcgtttgttattacgtttagttaattttttgtatttttagtagagatagggttttattatgttggttaggttggtttcgaatttttgattttaggtgatttatttatcgtggttttttaaagtgttgggattataggtgtgaattatcgtattcggttttatttttttatttttgagatagtatttcgttttgtttaagttggttttgaatttttggttttaagtgatttttttattttggttttttaaagtgttggaattataggtgtgaattattgtaatggttttattattattttatatttgtggagtgttttaaagttgataaagtttttagttaatttttatattattattttgtggcgttgaagaatagattttaggagcgtgaaagtgaagatattaaaaaggaagtttttgtaatattttaataaagagatgaagatttggattagattttagttttatttttttggtattagggagttgttttgtgaaagataattttttatagggttcggggggtgggtatgaggtagaggatggtttcggaatgaaattgttgtattttaagattattaattagatttttataaggagtgtgtaatttagattttttataggtgtagtttaaaataggttttgagtttttgtgagaatttaatgttttttttgatttgataggaggtagagtttaggtagtaatgtttgtttgttagttgtttatttgttgtgtagtttagtttttaataggcgataggtttgtgttggggcgttggggttttttgaattagaggaatgatagagagaatagatttaggtagttttttggatgtagaaataatttaatttagtgattatagatattatttgtgataatagtgaatttttttttatattaaagttatatatttttgttttcggttttttttatatttttagagtatttgtaaatttatagttttttttttagttgattgtagttatatgatttttatttttttggttattagttgtattagtagtgtttatttggttttaaattggttaattatttttttgtttttggaaaattagatttggttttatatttaagtttgattttaggaatttatggggtaaagtatatagatagatgtgtgtgaatgtttaattagagaaagtatatttgtagaaagattaagaaattgatgtcgggtgtggtggtttaagtttgtaattttagtattttcggaggttgaggtaggcgtattatttgaggttaggagttcgagattagtttgattaatatggtgaaattttatttttattaaaaatataaatattagtttttagttacgtaggaggttaaggtaggagaatcgtatgaaattgggaggtagaggttgtagtgagttgagatcgtgttattgtattttagtttggatgatagagtaagattttgttttaaaaaaaaaaaaaaaaagaaaaagaaaaagaaattgagatattaaggagagagttaaagataaataaattatttgaattttgatttttttttagatcgtttttttagttttttagaagtttagtagtatttattttttttgtttttgggtttttttttattttttttttttttttttaaaaaaaattttgaatttttaaggattaatgtttttgagttatgagatatttttatattttaataattttattttttatttttattgattaaattagtttgagtagtttttgttttttttttttaaaataatttattgagaatttggaaataaggtaaattagatttttttttaatagttaaattggtattttttgagaatatttataaatgtgttaattgaaaaattttggagtgtggtggtttatatttgtaattttagtgtattgagaggttgaggtgagaggattatttgaggttaggagttagagattagtttgggtaatgtagtgagattttttaattttataaaaaaaaatgttgttttgttttttttgtgtttttgttttgagatagagtttcggtttgtcgttaggttggagtgtagtggtgagatttgggtttattgtaatttcggttttttaggtttaagcgatatttttgttttagtttttcgagtagttgggattataggtatatgttattacgttcggtttattttttgtatttttagtagagatggagttttattatgttggttaggatggtttcgaattttagattttatgattcgtttcggttttttaaagtgttgggattatagacgtgagttatcgcgtttggttaaaaaaaatttttttttaaaaattagttaggtgcggtgatgtatatttgtagttttagttgtttgggaagttgaggaggggagattgtttgagtttaggagtttaaggttatagtgagttatgattgtattttgtattattgtattttagtttgggcgaaagagtgaaattttgttttaaaaaaaaaaaaaaaaaaagtataaatatatatatataaatgtatatatatagagatatatatatatatatatatatatatatgtattttttatatataaggtaatgtgtattaagtgatttaatttgtttttaatttattttttttagtatgtttataaaatgagagttttggaatagtagatatgtattgtaaataaatgaatatttttttataagtatatttttttaaggtttaattgaatatagtttgttataattttttaaaatttaattaattttatatttattaaatttataagtatcgtaatttag

SEQ ID NO: 77 - DNA, 7304 bp, Artificial Sequence
  chemically treated genomic DNA (Homo sapiens)
cggtcgtggttattattttttaaagttttatgtttttaggttaaaaaaaaaataaatttttttttagttataataaaaattttatattattttttttttatgtttttagaaatagtttagttaatttgaaaatgtttcgttattggaatattttgataggttaattatagatattaatagtaataggttttttttatttttagaattatattaagatagttatataagttagaaatgtaatatgttagaaatatttaataaagattttgatagattataagttttatgagggtagagaatttattttgtttattttgttatttggtatataattagtatttaattaatatttaattttgttttagtgatttagtttttagagtgttaattttgaatgtagattttagttataggattattgtggattaagttaaagaaaataaaatatataaaagtattttatttcggtatttttataattatagattttttttgttttgttttgtttttgagattgagttttttttttgtcgtttaggttggagtatagtgttataatatcggtttattgtaatttttgttttttatgttttagtaatttttttgttttagttttttaaatagttgggattataggtattttttattatttttagttaattttgtatttttagtagagacggggttttattatatcgtttaggttggttttgaatttttgattttaagtgatttgttagttttagttttttaaagtgatgggattataggtgtgagttatagtgtttggtttaattgtaaatatttttaaaaaacgttttagtattagtattttgttgagttaggtattttataaggatttattttaattgaatatgcgtattagaatgttgtaaaaattgagaaatagatttagatttattatgtatttttttgtgtgataagtattgtatatgtgttaatttaattttgattaaaattttaggagatattattttttatttgtaggtgaggagattgagtaatttgttgaaggttatatagttggtaatttttagatatgtgatataaatttaaatttgtgtgatttcgtagtttatgttggtttgtttatagtaatgttttttaaatttttttatgaagtaattttaagttgtaagaaaaattaaaatatattttcggggggggtttgggagattattgaagtatttagtttaagtttgatgtgtttttgattttatattttttttttaaattttatttttatatttgtattttatttttatattttgtttttatttttatatatatatttttttttgagatggagtttcgttttgttatagaggttggagtgtagtggtatgattttggtttattgtaagttttgtttttcgggtttatattatttttttgttttagttttttaagtagttgggattataggtgtttgttattatattcggttaattttttgtatttttagtagagatggggttttatcgtgttagttaggatagtttattttttgatttcgtgattcgtttatttcggttttttaaagtgttgtgaaataggcgtgagatattacgtttagttaatttatttatttttagagggagtttttttttgtttttaggttagagtgtagtggtttgattttatttattgtaatttttgttttttgggtttaagttatttttttgttttagttttttaagtagttgggattataggtatatattaatatgtttagttaatttttgtgtttttagtagagatagggtttcgttatgttggttaggatggttttgattttttgattttatgatttattcgttttggttttttaaagtgttaggattataggagtgagttatcgtgttcggtttattttatgttttattaaagtttatttttttttttaaaaattttaatgatttatttatattatatagatgtaatgtttgtttaatataaattattttaaatgatttaggtaaattatttaatttttttttttttgaaagattttttttgagaaaagtgattatataagaaggtgtattttttatatttattttatagttttgtttagtttttagtgcgtggttttaaaaatttggattttagtttgaaagtatgattatagagtaaattgtattaaagatattttaagaatgatgatgaaaataattattataggtaagggttagaagattttttttttttttttttttgagatggagtttcgttttgtcgtttaggttggaatgtggtggcgtgatttaggtttattgtaagtttcgttttttgggtttatgtaatttttttgttttagtttttcgagtagttgggattataggcgtttattatcgtatttagttaattttttgtatttttagtagagacggggttttattatgttagttaggatggtttcgattttttgattttgtgatttgtagaagatattaatagtatttaaattatatagttatagatagagttgagtgggggtttttttgttttttttattttgttttgttttgtttttgagatggagtttcgttttgtcgtttagattggagtggagttacgtaattttagtttattgtaattttaatttttcgggtttaattggtttttttattttagttttttaagtagttgggattagaggtatgtattattatgttggttaatttttgtattttttgtagagatggggttttgttttgttgtttaggttggttttaaatttttgagattaagcgatgtgttttttttggttttttaaagtgtttggattttaggtttaagttattgtgttaggttaaagtagttttgaattttttattgttaacgaaagaaattttaaatacgattgattttattgagtttgattaaattaattgaagatttattgttgaatgtggtaatattatgttttttttttatttaagaatttgggtgttttataagtataagtatgaaatttttttgaagatagtatttatgtatttattgagcgtttaaatatagattatattagaagttaagtaatgggttgagtggttaattatattttggttagttttataagattttttttgatttattaaatggggtataaatgtttttcgtatttttttcgttagtagggatttaaaattttaatagttcggggtagtaaaaaggatgttaggtttgaattttggttttaagaaaattgtgttgaggtgttttgtttgtttgagatagggttttattttattatttaagttggagtgtagtggcgtgattatagtttatttttaggttgaagggatttttttattatagatttttgagtagttgggacgatcggtgtatgttattatgttcggttaattttttgtatttttggtatagatagtgtttcgttatgttgtcgaggttggttttaaatttatgagtttaaagagatttatttgtttcgattttttaaagtgttgggattataggtacgagttattgcgttcggttagtttttttttttttattagaattgatattaaattatatgttgagtttttatgtttttattttttttttggtatggttatggttatttgaaatgtgtgggatttgttaaagtgtttaatatacgttgtttttttttttagatttaagtatgtagagggttttgatttgtaatatttagaaagtttttttaagttgggaagaaaagttaagattaagaattattgttaatagggtcgggcgcggtggtttacgtttgtatttttagtattttgggaggtcgaggtaggcggattacgaggttaggagttcgagattagtttggttaatatggtgaaattttttttttgggaataatataaaaattagtcgggtatggtggcgtgcgtttgtaattttaggtatttaagaggttgaggtaggagatttatttgaattcgggaggcgaaggttgtagtgagtcgatatcgtgttattgtattttattatgggtaatatagtgagattttgttttaaaaaaaaaaaaaaaaaaatcgttaataggtagggaataagttattttttgttaaataagttatatttatttaggtaaggaaggaatttataaattattttttaaattgtttgttttttttttcgaagttttgtaatttagaggcggttattattattgtttgaatatttttttttaagtttgtattataaaaggagtttttgtgtagtttagttttttttttttaggattttaggagtttagatatattaatggggatattagttgtttatttttttagttattgtttaagttaggtaggttatgaagaaataacggttttagtaatttttatgttcgggatacgattttcgggaagacgtgggtgggtgcggggaatgcggattgattttttttagcggtcgttgggggttggtttataatttttcgcgagggcgggaaaagtaatgtggtcgttgcggggggggggggttagaaaagggggacggttagcgggaagagttaagagattgtaattttataaagagtacgtagattaattttaatgattgttttttgagttttttatattaaaataatggtaattggttagtgtgtgttcgttacgtttattatttttattcgagattatttttattaatgattttgaggttttatttaataggttacggtggaggtaaggaaatgtggcgtggagaatttattgggtttggtttttcgttttatggttttcgtttatcgttttatagttagggtgtatatttgatgaggaatttttaaatgggattttggggaattaaaacggaatggtgtataagtgtgaaaatttataagattgcgtaaagttgtaaggttcggagtttcgtgcggttaggtcgtagagtcggtttttttcgttttacgtttgacgttacgtcgtacgttttagcgagggcgtgcggagtttggttgtttcggggttagtaggtgagtttgcgatgcgcgggaagacgtttcgttttgaaatgtagcgggatttggtgagtttttcgttgtttttagcggtgcgggtgaagttggtgtttgcggggttttagattgttgaggaatttttagaggtgaaatttttcgagtttagtaaaggtaacgatttttgatggtaagttgaggtatatcggtcgtcgttagcgtcgttttagttttcgttttttcgtttcggtttttagtttagttttcgttagattttgtttttttttacgtttatgtttatagcgtgaaagagtttttcgattttatttataagttgtttgaatggttaggagaattgtggtcgtgaaaatatttattaattgttttttttttggtaatgtttgttgaatgttttgaggattgttttatttaatttttaattcgtttacgtagattattatatttagtatatggatgagagaattgatattttggggagtttaggtaattttttatgttaattgggttaggaaatattggagttagaattggttgtttaatttttgttgttttaagatttaaggggtaagggttaaattttagaaatgtaggattttgtgtaggattagagatattaagaatgagaaagagagtagaattttcggaattttgaggaagtatagaaagaatatttttttacgtaattaattgaaatatttaaaattttatattttagagtattgtagatgggaattattgtattttgagatatataaatatgaggttggcggtggttatttgttgtgtatatttttttatgatatgtttggatttgtgttatttattgaagaagatggaatagaattttaagttattgtttttattgatggaaaatatagaggttttaattcgtttttaaagaataagtttcgtggatttagttttaattgtttaagttatatcgcgcgtagattgtgttttttaagatttgatgggtttttttttttttaataagttggttttttaaagaagaaatgtgagattttgaataataatgattattaataattattgattattttagatggttttgatattttattaagttttttatatgtatcgttttatttttattttatagacgaaaaaaatttgagtaaaaaagaaaaagtgaagtaatttgtttaaagttatgtagtaagtggtgttaggatttataaatttaggtaatttaattttagtatttaggtttttgataggatttttattttttaaatgttgttattattattgttttttattagttttatatttatggtttatatttttattagattaagtattgatatattaaattgataagtgatgttatttttattattatttttttattagtttgttttgtaattgttattttttttttttaggttatattgttagatgggtgaaattgtgtagtcgaggaagtataaatgtattttttaaaatgtttgtgttttgaataattgtttttattagtttggagtgatatatgaattttttatattagttatttttatgaaaagtttttattataaataatatatgtatatgtgttttttaaagttgtattttgttttaggtagttaaaatatttatttttatttttatttgaaaaataatttgtatattttatgagagcgagataattatggttttataagattaaaagggatagtaaaaatatggtaatagtgagtatatttttatttttgttttttgagatatttgtaggtatttagaaatgttttagttgaattgtttttgaggtaataggtaattttttatgtgatgattaagaaaacgaatatttttattaagttgaatttttttttttttttttttgagacggagtttcgtattgttatttaggttggaatgtagtggtgcgatttaggttggagtgtagtggtgtaggtttaagtgattgttttgttttagttttttaagtagttggaattataacgcgtgttattatgttcggttaatttttgtatttttagtagagacggagttttattatgttggttaggttggtttttaatttttgattttaggtgatttggttgttttagttttttaaagtattgggattttaggtatgagttattgtgttcggttaaattgaaaaattaaatggttgatagaatgttgtatttttatgtttttttatttttagtattattgttgtttataaattaataaagataatcgattattatgttatatttttaaatttttaaaattagggtttttttttttttattttatttttaga

SEQ ID NO: 78 - DNA, 7304 bp, Artificial Sequence
  chemically treated genomic DNA (Homo sapiens)
tttgaaagtaaaataagaaaaaaagaattttaattttagagatttaaaagtgtaatatgataatcgattgtttttattaatttgtagataatagtgatgttaggagtggagaaatataaaaatgtaatattttattaattatttaattttttagtttggtcggatatagtggtttatgtttaaaattttagtattttgggaggttgaggtagttagattatttgaggttaggagttgaagattagtttggttaatatggtgaaatttcgtttttattaaaaatataaaaattagtcgggtatggtggtacgcgttataattttagttatttgggaggttgaggtaggataattatttgaatttgtattattgtattttagtttggatcgtattattgtattttagtttggatgatagtgcgagatttcgttttaaaaaaaaaaaaaaaaaaatttagtttaataaaggtattcgtttttttagttattatataaagaattatttattattttagaaataatttaattaaagtatttttgagtatttataagtgttttaggaagtagaaataaaaatgtatttattattattatatttttattattttttttggttttatgaagttataattatttcgtttttataaggtatataaattattttttagatgagaatgaaaatagatgttttaattgtttaaaataaggtataattttaagaagtatatatgtatgtattatttataataaaaattttttatggaaataattgatgtaaaaaatttatgtattattttaaattaatgagaataattatttaaggtataagtattttaaagaatatatttatgttttttcgattatataattttatttatttgatagtgtggtttgagaaaagaaaatggtaattataaaataagttggtgaagaaataatggtgaggatgatattatttattagtttgatatattagtgtttgatttgataagaatatgagttataaatatggggttaataaaagataatggtgatgatagtatttaggaaatgaaaattttattaagagtttgaatgttggaattagattgtttgggtttgtaaattttggtattatttattgtatgattttgggtaagttattttatttttttttttttgtttagatttttttcgtttataaaatgggaatgagacgatatatgtaaaaagtttggtagaatattaagattatttaaagtagttaatagttgttagtgattattattatttagggttttatattttttttttgaaaagttaatttgttgaagaaaaaagagtttattaaattttgggggatatagtttgcgcgcggtatgatttaaatagttaaggttgggtttacgagatttattttttagaggcgaattgaaatttttgtattttttattagtaagggtagtaatttaaaattttgttttattttttttagtgaatagtataggtttagatatgttatagagagatgtgtataataagtgattatcgttagttttatatttgtatgttttaggatgtagtggtttttatttgtaatgttttggaatatgaggttttgggtgttttagttaattacgtaagagaatattttttttatgtttttttaagatttcggggattttatttttttttttatttttagtgtttttagttttatataaaattttgtatttttgaaatttaatttttattttttggattttggaatagtaaaaattagataattaattttgattttagtattttttaatttagttagtatgaaaagttatttaagttttttaagatattagtttttttatttatatattgaatataataatttacgtaagcgggttgagggttaaatgagataatttttaaagtatttagtaggtattgttagaggaaaagtaattagtaaatgtttttacgattatagtttttttaattatttagataatttgtaagtggagtcgaggagtttttttacgttgtaaatatggacgtgggaggaagtagaatttaacggagattgggttgaaggtcgaggcgagagaacgaagattgaggcggcgttgacggcggtcggtgtgttttagtttgttattaggagtcgttatttttgttaagttcggagggttttatttttaggagttttttagtagtttggaatttcgtagatattagttttattcgtatcgttggagatagcgggaaatttattaaatttcgttgtattttaaagcggaacgttttttcgcgtatcgtaggtttatttgttaatttcggagtagttaaatttcgtacgttttcgttggggcgtgcggcgtgacgttagacgtaaagcggaaggggtcggttttgcggtttggtcgtacggggtttcgggttttgtagttttgcgtagttttgtaaatttttatatttatgtattatttcgttttgattttttaaaattttatttagagattttttattaaatgtatattttgattgtaaaacgatggacggagattataggacggagagttaggtttagtgggttttttacgttatatttttttgtttttatcgtggtttgttaggtgaagttttagagttattaataggaatgatttcgagtgggagtagtgagcgtaacgggtatatattagttagttattattattttggtgtgaaaagtttagggaataattattagaattaatttgcgtgttttttgtagagttgtagttttttggtttttttcgttgatcgttttttttttttgatttttttttttcgtaacgattatattgtttttttcgttttcgcgagggattgtgggttagtttttaacggtcgttgggagggattagttcgtatttttcgtatttatttacgttttttcgggagtcgtatttcgagtatggaggttattgagatcgttatttttttatggtttgtttagtttaagtagtagttggaaaagtaagtaattaatgtttttattagtgtgtttgggtttttggggttttgagaaggaggggttgggttatataagagttttttttgtggtatagatttgggaaggggtgtttaagtagtggtagtgatcgtttttaaattatagaatttcggggaggaaggtaagtagtttagaaggtggtttatgagttttttttttgtttaggtgagtgtaatttatttagtagggggtaatttattttttatttattggcgatttttttttttttttttttgagatagagttttattgtgttgtttatgatggagtgtagtggtacgatgtcggtttattgtaattttcgtttttcgggtttaagtgagttttttgttttagttttttgagtatttgggattataggcgtacgttattatgttcggttaatttttgtattatttttagagaaggggttttattatattggttaggttggtttcgaatttttgatttcgtgattcgtttgtttcggttttttaaaatgttgggagtataggcgtgagttatcgcgttcggttttgttggtaatgatttttagttttgatttttttttttagtttagaagaattttttaaatattgtaaattagagttttttatatatttagatttaaaaaaggaaataacgtatgttgagtattttagtaaattttatatattttaaatggttatagttatgttaaaaggaagataaggatatggaagtttagtatatagtttaatattaattttgataaaagaaaaaaagttggtcgggcgtagtggttcgtgtttgtaattttagtattttgggaggtcgaggtaggtggatttttttgagtttatgagtttgagattagtttcgataatatggcgaaatattgtttgtattaaaagtataaaaaattagtcgggtatggtggtatgtatcggtcgttttagttatttagaagtttgtggtgggaggatttttttagtttgggagtgagttatgattacgttattgtattttagtttgggtgatagagtgaaattttgttttaaataaataaaatattttagtatagtttttttaaagttaagatttaaatttagtattttttttattatttcgagttattaagattttgagtttttattggcggggagaatacgagaagtatttatattttatttggtaggttaaagaaagttttgtaggattggttaaaatgtggttggttatttaatttattgtttaatttttaatatggtttatatttgagcgtttagtggatgtataaatattatttttagggagattttatgtttatgtttataaagtatttagatttttgggtgaagaaaaaatatggtattattatatttaataataagtttttagttagtttggttaaatttagtggaattagtcgtgtttagaatttttttcgttgatagtggaaagtttaaaattattttggtttggtatagtggtttaagtttggaatttaagtattttgggaggttaaagagggtatatcgtttgattttaggagtttgagattagtttgggtaatagggtaaaattttatttttataaaaaatataaaaattagttagtatggtggtatatgtttttagttttagttatttgggaggttgaggtgggagaattaattgagttcgggaggttgaggttgtagtgagttgagattgcgtaattttattttaatttgggcgatagagcgagattttattttaaaaataaaataaagtaaaataaaaaaaataaaaaaatttttatttaattttatttatagttgtataatttaagtgttattaatattttttgtagattataaggttaggagatcgagattattttggttaatatgatgaaatttcgtttttattaaaaatataaaaaattagttgggtgcggtggtgggcgtttgtagttttagttattcgggaggttgaggtaggagaattgtatgaatttaggaggcggagtttgtagtgagtttagattacgttattatattttagtttgggcgatagagcgagattttattttagaaaaaaaaaaaaaaaaaattttttggtttttgtttataataattatttttattattatttttaagatgtttttaatgtaatttgttttgtagttatgtttttaaattgggatttaggtttttgaaattacgtattaggaattaaataaagttatgggataaatatggaaggtgtatttttttgtgtaattattttttttaaaaaaaattttttagggagggaagagttaaatgatttatttaagttatttgaaatggtttatattaagtagatattatatttgtgtagtgtggataaattattaaaatttttgaaaaagaaaataaattttaataaaatatggggtaggtcgggtacggtggtttatttttgtaattttagtattttgggaggttaaggcgggtggattatgaggttaagagattaagattattttggttaatatgacgaaattttgtttttattaaaaatataaaaattagttgggtatgttgatgtgtgtttatagttttagttatttaggaggttgaggtaggagaatagtttgaatttaggaggtagaggttgtagtgagtgagattaggttattgtattttagtttggaaatagagagagattttttttaaaaataaataaattagttgagcgtgatgttttacgtttgttttatagtattttgggaggtcgaggtgggcggattacgagattaggagatagattattttggttaatacggtgaaattttatttttattaaaaatataaaaaattagtcgggtgtggtggtaggtatttgtagttttagttatttgggaggttgaggtaggagaatggtgtgaattcgggaggtagagtttgtagtgagttaagattatgttattgtattttagtttttgtgatagagcgagattttattttaaaaaaaaatatatgtatagaaataaaaataaaatgtgggggtaaaatgtaaatataaaaataaaatttaagagaaaagtatgaggttagagatatattaggtttaaattggatattttagtaattttttaaatttttttcgggaatatgttttggttttttttgtaatttgaggttattttatgaaaaaatttgagagatattgttatgggtaaattagtatgggttgcggagttatatagatttggatttgtattatatgtttggaagttattaattatgtgatttttagtaagttatttagtttttttatttgtaagtagaagataatattttttggggttttggttaagattaaattaatatatatatagtatttattatataaaaaagtatataataaatttgagtttgttttttagtttttatagtattttaatgcgtatatttagttggaataaatttttatagaatatttagtttagtagaatgttaatgttgagacgttttttaaaaatgtttataattaggttagatattgtggtttatatttgtaattttattattttaggaggttgaggttggtagattatttgaggttaggagtttaagattagtttgggcgatgtggtaaaatttcgtttttattaaaaatataaaattaattgggggtggtggagggtatttatagttttagttatttggaaggttgaggtaggagaattgttggaatatgggaggtagagattgtagtgagtcgatattatgatattgtattttagtttgggcgataagaggaaaatttagttttaaaaataaaataaaataaaaaaagtttataattgtaaaagtgtcgaagtagagtatttttatatattttattttttttgatttgatttatagtaattttatgattggggtttatatttaggattagtattttgaagattagattattaaaataagattaaatattgattaaatgttagttatgtgttagatgatagggtaaataagatagattttttgtttttatggagtttataatttattaggatttttattgagtatttttgatatgttgtatttttgatttgtgtagttattttgatgtaattttaagggtaggaaggatttattgttgttaatgtttatagttaatttgttagagtattttaataacgagatatttttaggttgattaggttgtttttggagatataggagaggaataatatgaaatttttgttatagttggggagaagtttattttttttttagtttaagaatatagaattttaaaaaatggtgattacggtcg

SEQ ID NO: 79 - DNA, 8753 bp, Artificial Sequence
  chemically treated genomic DNA (Homo sapiens)
aagttaggaatttagacggtaattggttagattttaaattaaaggagaaaaagaaaaggaagggattatttaagtttttttatcgtatatgtgttaatataatatgtaaatagtatagtataatagttaaaggaaggaaaatttaaggaaagatttaaaacggtatatttgatttttatattattagtggttattagtattattaggaggaattttattgaaaattaaggatggagaattgtggttgttagggaataaggaggggttgttgtataaatataaagaggtagtattaaggagtgagggaatttttttgtggtaatggaatagttttgatttttattatagtgggattatatgaatttatatatggataaaattgtataaaattataaatgaaaaaatgaaggtagattaagaaaatgttgaaaattaaataaattttgtagtgttatttaaagtaatgtgttaatgttaattttatggttttgatattgtattatagttgtatgagacgtcgtaattggggtagattgggaaaaggatacgttggattttattatttttgtagttttttgtgagattgtaattatttcgaaataaaaagttttaagtaaagcgataataatatttttaattttataagtaagaagagagtagggtttgtttttttggaggtaaagaaaatagtttttaatgtagttttattatttatattaacgaggataaataagaaatggtagttttaggtatattttggtagttaggtttatatttagttgtagatgataattaaaagttaatattgattaagtaatggatgtatattatagaggtaaaattttagagtacgtgaaatatattgtgtttttgtttattttttagagggtagttgagtgggggtatattgattaatgtttaaatattgaattatatgttttttattttgggatcgtttggtaggaaaagagattttttattttagtagatttggatatattattaatgtttgaagtatgttttttattttttttgggatatttttttgttttttttgtagttgaggtatatatgtttgtgttagtttttattttttttttcgtaggtattcgtagaaaaatttaaaaagttgtttttgcgaagtagtttttttttttttaaatggatgatttatttttttagtatagagtgtagggagatataaagaaatgagttatgtcgaatatatttttaatgtttttattcgcggagtattttttagaaataatataacgttagtgagaagaaatagaaggtattgtattaagataaagtagtaattattggttcgtttgggaaaggcgggatttgtttgtttaagtatcgtttttagtttaattttttacgttattttttgaaaatattttttttaaggggtggattttatttttttacgcggatttttatatttaataatattaatagttatatttgtttcgggcgtagatttataattttacgttcgtattttttattgaacgttatgtttagttttgattttaaatttttaggtggtcgtttttttaagaatgagaaatttagtaggaatttttttagtttgagttttttgttaaggtagaggattgacgattaggagacgaatttgtgttataagtggaaagtagtgtgggggtgggtcgtagggacgttttttgcgggggtcgtggagaggggttttttttttttaggggtgttttatatttatttgttttcggcgtttaaagtaatagagtttttagcgtagttatgtttgagtcgagttaggtgatagaatttatttcgaatagcggtggtgggggtggtgataaagattgaaagttttatttttattggtttaaggtagggaagatgaaaattaagtgttatatttgtttgagttacgtgacgttattttttcgggagtagggaaagttagaaagttcggaaagaggaaattagttatttggttgcggattattttttttaattgtgatagtttcggcgtttaatatttttagttttgtattcggtcgagtaggtggtaggaagaattgtgattttggattttttttttttttttatttttttatttttttaatatgtgaagttaatatttattgaacgttaattagtgatggtgttttgttaggcgcgggggatattcggagttaggagaattgggtttttttttattattattttatttattgggtttttttgtttcggaattttgcggtttgaatttttatatttttttgttttattttatttatttatttgtatatttattttataattgttaattgaacggtgtgttaggttttattttatttttttagagatagagtttttttgtcgttggagtgcggtggtgtgatttcggtttatggtagtttcgaattttttggattaagtaatttttaagttttagtttttttgtagtagttgggattagaggcgcgcgttattatatcgggtttaggttttattttttaagttgagtaaatggaggtttttttttttaagggagatgtaggttaaaaattaggagacggtgggttaaattataagatagaagtatgtataagagattagagagtaaagaatgagtaaaggttttttcgtaaatataataatttgaaattaagttttttgttttgagatagagtttcgttttgttttttaggttggagtgtaatggcgcgatttcggttcgttgtaattttcgtttttcgggtttaagcgatttttttgttttagttttattgtgtagttgggataagcgatttttttgttttagttttattgagtagttgggatttataggcgcgcgttattatattcggttaatttttgtatttttaatagagataggggtttattatgttggttaggttggtttcgaatttttgattttaggtaattcgtttatttcggttttttaaagttttgggattacgggcgtgagttatcgtttttagtttgaaattaatttttgaagtaacggtttattaggtttgtttattatagttgttttatattaagttttttgtttggtttttttggtgtgttttaattatagatttttagttttttttattatgtgtgttttaggtttagtaattttatttagtattttttaaattatttaattattaaagggtggtgaaaagagtaagttaaaataaataaaacgtttttttttaaaaatttttttgtgattggtggattgttttcgatttttgagaaaagtaatatggttttttggtttattaaggttttttttttttttgaggtaatgtttggttttttttattttagttttttaagtagttgggattataggtgtttgttattatgtttggttaatttttgtatgtttagtagaggcggggtttcgttatgttggttaggttggtttcgaaattttgagtttaagtgatttgtttgttttagtatttcgaagtgaaatcgtttttgtaaaattataattgaggaaattatgatagtgaaagaaattagatttaatcgattttattttgtttttaatcgttaagttgtttttgtttatttttgggcgtaggttgaattaattttggggaggaatttagtttatggtttgattttgaaataaaattgataatagtttttttcgaaaagatttattttttgtttggggattagtttgtttttgtaggattaataaattagttataagtttagaaattatagtttagaggttatgtagtttttggttttaagagtttgaatttttttaaattgttttcgggggtgatattattattgtaagttttaagattagtgtttgagatattttgtagattttgtattttatggattagttgatattatttagattagtaatttggcgtaattagttttgttattatatttaggaatagaagatattaagaaaattttatttcgattttttatgattttatttttaatttgattaattagtattttttattttttaagtttttattagttaaattattggtaaaaatttcgattcgtaaatgttcgggataattgatttaagtaataataaaattttagtttttcgtatagttggttttgcgtgaattattttttttgtattgtaatttttttgttttgataaatcggttttgtttaggtagttggtaaggtgaatttatcgggtagttttaaaagtgttgggattataggtatgagttatcgcgtttagtttattttttgtatttttttgtagaggcggaggggtgggggagggtgttttattatgttgttaaggttagtttcgaatttttaggtttaagtgattttttcgtttcggttttttaaagtgttgaaattacgggcgtgagttattgcgtttggtttttttaagttattgtgaaaagtgatgatatacgaaaaaaaagatttttagggtcgagagcggtggattacgtttgtaattttagcgttttgggaggtcgaagcgggcggattacgaggttaggaaatcgagattattttggttaatacggtgaaatttcgtttttattaaaaatataaaaaaattagtcgggcgtggtggtgggagtttgtagttttagttattagggaggttgaggtaggagaatggcgtgaatttaggaggcggagtttgtagtgagtcgagatcgcgttattgtattttagtttgggcgatagagcgagatttcgttttaaaaaaaaaaaaaaagaaagaaaaaagaaaaatttttaaatagggtgtttttttgttttatattttttttggtgatggttttgtaatagattttgataattattatattgagaaattgttttagattcgatttgttaggttgattatagtattaattataatttttagtaagtcgcggagttaatttgggtttttgtcggtttttgattggatatagtagttagaatgacgatttaattagtgtttcggttgttgttttgcggcgtttttcgcggggaaattgtgtaaagggtggggaaatttgaaagttggatgttgtagattcggtattggaaagttttatgtggggtgtcgttgtggggaagtggggttcgtttattattttttgttttttttttaggttcgtgggtttcgatattgggggagcggagatttttttttgggtgttggttacgtttttttaagattcgggatcgttattaagaatttcgttgtgaattgggggagtttcgggtttttttttggtggggaatgtttggaagttgtttattgttggaaaaagttttttttaggggattttgggtgatgttttcgtttgttgttgtttatttttttttttagttttttttcgtttcgggtagtttgttattaggggaagttgagggatttttttattttaggtggtgttggagagcgtggaatttggagttcggtttttggattcgaatgcgagttttatattaattgttagttgtttaattttgtttaagttttttaattagttattttagtatttttatttgtaaagtgaggtaaaatattcgaagtttttggaatagtgtggtacgtaataagggtttaataaatattagttaatattgtttttaaatagttgttgaatatttaatatgaagaattttttttttttggtggtaaggaggatagggtttattttttagggttgatcgtttttttttatgtgtaatatatatacgtgttttcgcgtatatatatatcgtaggaatttacgtgtttcggtgggggtaaataaatttgtaagttataatagtattttgataagattatcgaatagatatgtgcgaagttgatgagaatattggagaggaaaagatttgattttggggaaggttttgtggagggaagttagggagataggatgcgtgatttattaatatatatattatgtggttggagggtagattatgtgagagttattaaatgatgattgttgattttaagtattatgtgttacgtatttttcgagttttttaatttttattatagttatatgaagtagtaaatttatatgattgtaaaataagggttttaaggaaattaagatattgagaggtgaagtaattgttaggaaggataggaattgaacgttgtaatgtgatgtatgagtgagaaggaagtgagggattaatttttgatgtttttttttgcgattttaagaagtttggaatttattttgtggtttattagttttatgggaagtgttaaaggataatcgtgattttttaggaagttatttaaggtaggattgtgatattgatttgatttttgtaggcgaatttggggtttttttttgtttgtttttatagtatttttaaatagtaattgtaatgtttattgtatggttgtagttatttgtgtgtatttttttttttattttaattatgagtatttaaaggggagggaatatgtttaaatgatttttgtattttagattttagtagggtgtgtatttaaatgtttgtggaaggagtaaattaaggaataaatgaatggagtggttagaaataatatgtaatagtttaggtaagtgatgggagtggttttattaaggtagaaatggtagaattggttgttgttaaagtttttgtagtttagaatttatagttttttgtttgtttgttttttgtttttgatagggttttagtttgttttttaggttagagtgtagtggtatgattatagtttattgtaggttcgattttttgggtttaggtgatttttttattttagttttttgggtagttaggattattataggtgtgcggtataatgtttagttaatttttgtatttttttgtggagataggttttttttatgttgtttaggttggttttaaatttttgggtttaagtaatttgtttgttttagttttttaaagtgttgggattgtaggcgtgagttattttgtgtggtttatggtttttttttttttttttttttttttttttaaattgaatttattagtttaaatggtgttattatttgaaattatttgatttgaaaagatattaggtaatattatagtaggtattatttggttttttattgggggaaataagttattgttaataaatttttatggagagaaatgaggaggatgtatttttgtttgtgagaggtgtgtatgtatgtatattgtgtgtgcgtgtgtgtgtgtgtgagagagagagattgatttagtttgatttagagaatttaggtgttaaatagaaatttgggttatggtattggaaataaataaatatatatatttttagtatatatatatttttattttaaaatgttattttttttttgataattatattgttttattttttggatttatgaagagtttttgttttagttcgttttagaggatatttttttattattttaatgagatatatagttttttttttgtatgtattaagagatttatagtaatttttttttagttttgtgaagataaattttttatgagttttatttatttttagtaaggtataatagtgaaatttaattgtatgtgagaatataagtagttagtgtaataaagaatattttgggttaggtttgatcgtttatgtttgtaattttagtattttaggaggttaaggcgagaggattatttgagtttaggagttcgagattagtttgggtaatatggtaaaattttgtttttataaaaaatataaaaattgggtaggtatggtgtcgattttgtttttataaaaaatataaaaattagttagatatggtggtgtacgtttgtggttttagttatttgggaggttgaggtaggaggattgtttgagtttaggagggggaggttgtagtgagttgagatcgagttattgtattttagttggggtgatagagttagatttgtttcgttttttttttttttttttatatatatatttaaaaagaatattttaatattgtagtgataaaattttatttgatttagaaggtgtgttttgatttttagaaaaaggaagagttaaatatgattatggatttgtagtagagtgtaatggttaagaggataggttttagaattagattgtttggatttaaattttggattagttatttatgttttttggtgataatggattagttaatttttttaggttttagtttttttatatgtaaaaaaggggttaataatttattttttttttagggttattgagaagattaaatgtgataatttagataagttttggaatagtgtttggtatgtggtaggtgttttataaatatatttattgtcgttatagtgtaatgtaaattgttatagtgtaatagattttttagtagttttgtttggaaatatgttttgaaagttaattatatttttaaataaaatttatatatgtattgaatattttaagatgttttataaatgtgaagtggtattatatttatgtagtaaatattaattaattgtgtgaaattatatttgaggttgttttgtagattttttatgtgtttgtttgacgaataattgttttttttatttaaaatatttaaaaaggttttatagtatttttttattagtaatatttttaatataatatgttttattttgtatatggagaaatttgaggaatttttaattttgttttggatagtttatttattattatttatgttatattttgttgttttttttatggttttttttttttttgttggatttggagg

SEQ ID NO: 80 - DNA, 8753 bp, Artificial Sequence
  chemically treated genomic DNA (Homo sapiens)
tttttagatttagtaaagaaaagaagaattatgaaaaaaataatagaatataatataagtgatagtgaataggttatttaaaataaaattaaaaattttttaagtttttttatatgtaaaatgaaatatattgtgttaaaaatattattgataaaggaatgttatagaatttttttaaatgttttaaataggagggataattgttcgttaaataggtatatagaaaatttataaggtaattttaaatataattttatataattaattgatatttattatatgaatatagtattattttatatttgtagagtattttaaaatgtttaatgtatgtataaattttatttggaaatgtaattaatttttaaggtatatttttaaatagaattattagaaagtttattgtattgtaataatttatattgtattgtaacggtaataggtatatttatggagtatttattatatattaggtattgttttaaaatttatttaaattattatatttaatttttttaatagttttagaaggaaagtagattattggttttttttttatatatgagaaaattaaagtttggaaaagttagttagtttattgttattagaaaatataaataattgatttagaatttgaatttaggtagtttaattttgaaatttatttttttaattattatattttattgtaagtttataattatatttaattttttttttttttaggagttagagtatattttttgaattaaatgagattttattattgtagtattaaaatgttttttttaaatatatatatagagagagagagagagagcgagataggtttggttttgttattttagttggagtgtagtggttcgattttagtttattgtaattttttttttttgggtttaagtaatttttttattttagttttttaagtagttgggattataagcgtgtattattatgtttggttaatttttgtattttttgtagagatagggtcgatattatgtttgtttaatttttgtattttttgtagagatagggttttgttatgttgtttaagttggtttcgaatttttgggtttaagtgattttttcgttttgattttttaaagtgttgggattataggtatgagcgattagatttggtttaaaatgttttttattatattagttgtttatatttttatatgtagttaaattttattattgtattttgttaggggtaaatgaggtttatgaaagatttatttttatagagttaaaaaagaattattgtgagttttttaatgtatataaaggagaagttgtatattttattgagatggtaaagaagtattttttggaacgaattgaaataggaattttttatggatttaaggaataaagtaatatagttattagaaaagaagtaatattttggaatgaaaatatatgtatattgagaatgtatatatttgtttatttttaatattatggtttaaatttttatttaatatttaaattttttgaattagattgaattaattttttttttttatatatatatatacgtatatataatatatatatatatatattttttataaataaaaatatattttttttatttttttttatgggaatttgttagtaatgatttgttttttttagtagaaaattaagtgatatttgttataatattgtttagtgtttttttagattaggtagttttaagtaatgatattatttagattgataaatttaatttaaaaaaaaaaagaaggagaaagaaaagaattataggttatataaggtagtttacgtttataattttagtattttgggaggttaaggtaggtaaattgtttgagtttaggagtttgagattagtttgggtaatatagagagaatttgtttttataaaaaaatataaaaattagttgggtattgtgtcgtatatttgtagtagttttagttatttaggaggttgagatgagaggattatttgagtttaggaggtcgagtttgtagtgagttgtggttatgttattgtattttagtttggggaatagattgagattttattaaaaataaaaaataaataaataaaaaattataaattttaaattataaggattttaataataattaattttgttatttttgttttaatagggttatttttattatttgtttggattattgtatattgtttttggttattttatttatttgttttttaatttattttttttataggtatttaaatatatattttgttgaggtttggggtataagaattatttaagtatatttttttttttttgaatatttatagttgagatgaaaagagaggtatatataaataattatagttatgtagtaagtattataattgttatttaaaagtgttatggaagtagataggaagaagttttaaattcgtttgtaaaagttagattagtgttataattttgttttgagtagttttttaaaaagttacgattattttttaatattttttatgggattggtagattataggataaattttaaattttttagggtcgtagagaaaaatattaaaaattggttttttattttttttttatttatatattatattgtaacgtttagtttttattttttttggtagttattttattttttagtgttttaatttttttaaaatttttgttttatagttatatgaatttattattttatatgattgtagtggaggttaaaggattcggggagtgcgtggtatatagtatttaaggttagtaattattatttaatgatttttatatgatttgttttttagttatatggtatgtgtattggtaggttacgtattttgtttttttgatttttttttataaaattttttttagagttaagtttttttttttttaatgtttttattaatttcgtatatatttattcgataattttattaaaatattattatggtttgtaagtttgtttgtttttatcggagtacgtaaatttttgcggtgtatgtgtgcgcgaaagtacgtatgtgtattgtatatgaggggagacggttaattttggagaatgaattttgttttttttattattaagaaaagaaaattttttatgttagatgtttaataattgtttaggaataatattagttaatatttattgagtttttattacgtgttatattgttttaaaggtttcggatattttattttattttatagataaggatattgaggtaattagttgagaaatttgggtaaagttaaatagttgataattggtgtgaagttcgtattcgaatttagggatcggattttagattttacgttttttaatattatttgaagtgggagagttttttaattttttttaatgataggttgttcgaagcgggaaggggttggggaggaagatgggtagtaataggcggaaatattatttagaattttttaaaaagagttttttttaataatgagtagtttttaagtattttttattaaaagaaggttcgaagtttttttaatttatagcggggtttttagtgacgatttcgagttttaagggggcgtgattagtatttaagagaaaattttcgtttttttaatatcgaaatttacgagtttagggaaggagtaggaaataatgagcgaattttatttttttataacggtattttatatgaaattttttagtatcgggtttgtagtatttaatttttaagtttttttattttttatatagttttttcgcggaaaacgtcgtaaagtaataatcgaagtattgattgagtcgttattttggttattgtatttaattagaggtcggtagaggtttaggttggtttcgcggtttgttgggaattgtagttaatattatgattagtttaatagatcgaatttgaagtagttttttaatatagtgattattaaaatttgttgtaggattattattaaagagaatgtgaaataagggaatattttgtttggaaattttttttttttttttttttttttttttttttgagacggggtttcgttttgtcgtttaggttggagtgtagtggcgcgatttcggtttattgtaagtttcgttttttgggtttacgttatttttttgttttaatttttttagtagttgggattataggtttttattattacgttcggttaatttttttgtatttttagtagagacggggttttatcgtgttagttaggatggtttcgattttttgatttcgtgattcgttcgtttcggttttttaaagcgttgggattataggcgtgatttatcgttttcggttttggaaattttttttttcgtgtattattattttttataatggtttaaaggggttagacgtagtggtttacgttcgtaattttagtattttgggagatcgaggcgggaggattatttgagtttgggagttcgagattagttttggtaatatagtgagatatttttttttattttttcgtttttataaaaaaatataaaaaataggttgggcgcggtggtttatgtttgtaattttagtatttttgaaattgttcgatgggtttattttattagttgtttagatagaatcgatttattaggataggggaattgtaatgtagaaagagtaatttacgtagagttagttgtgcggaagattgaagttttattgttatttaaattagttgtttcgagtatttgcggatcggagtttttattaataatttggttggtaggggtttaggaagtggggagtgttgattggttaggttggagatggaattataaggggtcgaagtgaggtttttttaatgttttttgtttttgggtgtgatggtaaaattggttgcgttaaattattggtttgagtggtgttagttgatttatggagtgtagggtttataaaatattttaagtattgattttagggtttgtaatagtgatgttattttcgggagtaatttggggaggtttagatttttggagttagaggttgtatgatttttaaattgtaatttttaaatttgtagttaatttgttagttttgtaaaggtagattggtttttaggtaagaagtgggttttttcggaaagggttgttattaattttgttttagagttaaattatgaattgaatttttttttaaagttagtttagtttacgtttaggaatgaataaggatagtttaacggttagaagtaagatagagtcggttaggtttgattttttttattgttataatttttttagttataattttgtaaaggcggttttatttcggaatgttgaggtaggtagattatttgagtttaggatttcgaaattagtttggttaatatggcgaaatttcgtttttattaaatatataaaaattagttagatatggtggtaggtatttgtgattttagttatttgggaggttgaggtgagaggagttagatattgttttaaaaaaaaaaaaaattttaatgggttagaaagttatgttattttttttaggaatcgaggataatttattaattatagaagagtttttggaagaaaacgttttgtttgttttaatttgttttttttattattttttggtgattaaatagtttgggaaatgttgaatgaaattattaaatttgaaatatatatagtgaggaaagttgagagtttgtgattaaagtatattagggaaattaaataaaaggtttggtgtaaggtagttgtggtgagtaaatttagtaagtcgttattttaagagttggttttaggttgggaacggtggtttacgttcgtaattttagaattttgggaggtcgaggtgggcggattgtttgaggttaggagttcgagattagtttggttaatatggtgaatttttgtttttattaaaaatataaaaattagtcgggtgtggtggcgcgcgtttgtaaattttagttatttagtgaggttgaggtagaagaatcgtttattttagttatatagtgaggttgaggtaggagaatcgtttaaattcgggagacggaggttgtagcgagtcgagatcgcgttattgtattttagtttgggagatagagcgagattttgttttaaaataaaagatttggttttagattattgtgtttgcgaaaaagtttttgtttattttttgttttttgattttttatgtatatttttgttttataatttagtttatcgttttttaatttttggtttgtattttttttgagaagaaggatttttatttatttaatttagagaatagggtttaagttcggtgtagtggcgcgcgtttttagttttagttattataggaaggttgaggtttaaggattatttgatttaggaagttcgaggttgttatgagtcgagattatattatcgtattttagcgatagagagattttgtttttaaaaaaataaaataaagtttagtatatcgtttaattaatagttgtagggtaaatgtgtaaataaatgaatggagtgaagtagaagaatatggaaatttagatcgtagagtttcggaataaaagagtttagtagatagaataataatggaggagaatttagtttttttagtttcgggtatttttcgcgtttggtaaaatattattattggttggcgtttaataaatgttgattttatatgttaaggagataagagagtggaagaaaaaaaaaaatttagggttatagttttttttgttatttgttcggtcgaatgtagaattgaaagtattgagcgtcggagttgttataattgagggagatggttcgtagttaggtagttgatttttttttttcgagttttttagttttttttattttcggagaggtggcgttacgtgatttaaataaatatggtatttaatttttattttttttgttttgagttaataggagtggggtttttagtttttgttattatttttattatcgttgttcggagtgggttttgttatttgattcggtttaaatatggttgcgttgagagttttattgttttgggcgtcgggagtaggtgagtgtaagatatttttgagagggaggggtttttttttacgattttcgtagagagcgtttttgcggtttatttttatattgttttttatttatgatatagattcgttttttggtcgttaattttttgttttaatagagggtttaaattagggaggtttttgttgaattttttatttttgaggaggcgattatttggggatttggagttaagattgggtataacgtttagtagggaatacggacgtagagttatgggtttgcgttcggagtaaatatgattattaatattattaaatataggaattcgcgtgaagagatgggatttattttttgaagaaagtgtttttaaaaagtaacgtgggaaattaaattgaaaacgatatttaggtaagtaagtttcgttttttttaggcggattagtagttgttgttttgttttaatatagtgttttttgtttttttttattggcgttgtgttgtttttaggaggtatttcgcgaatgagaatattgagaatgtgttcggtataatttatttttttgtatttttttgtattttgtgttgggaaaatgaattatttatttggaaaagaggaagttgtttcgtagaagtagttttttggatttttttgcgaatgtttgcggaggggagaatgggagttggtataggtatgtgtattttagttataggagggataaggggatattttaaagagggtagaagatatattttaggtattggtggtgtgtttaaatttgttgaggtaagggatttttttttttattagacggttttagggtgagagatatgtggtttaatatttgggtattggttaatgtgtttttatttaattattttttgaagaataagtagaggtatagtgtattttacgtgttttgaaattttatttttatagtatatatttattatttagttaatattggtttttgattattatttgtaattgaatgtaagtttggttgttaaagtgtgtttgaaattgttattttttgtttattttcgttaatatagatggtggaattgtattgaaaattattttttttgtttttaaaaaagtaaattttgttttttttttgtttatgagattgaaaatattgttgtcgttttatttaaaattttttatttcgaaataattgtagttttataagaagttgtaaaaataatggagtttagcgtattttttttttagtttgttttaattgcgacgttttatatagttgtagtataatattaaaattatgaaattgatattggtatattattttaaatgatattatagagtttatttggtttttagtatttttttaatttgtttttatttttttatttgtagttttatgtagttttatttatatatagatttatgtaattttattgtaataaggattagaattgttttattattataaaagaatttttttattttttggtgttatttttttgtatttatataataatttttttttgttttttggtaattatagttttttatttttgatttttaatgaagttttttttggtgatgttagtaattattggtgatgtaggagttaaatgtatcgttttaagtttttttttgggtttttttttttttgattgttatgttatattgtttatatattgtattagtatatatacgatggagaaatttaagtgatttttttttttttttttttttttttaatttgagatttagttagttatcgtttaaatttttaattt

SEQ ID NO: 81 - DNA, 5567 bp, Artificial Sequence
  chemically treated genomic DNA (Homo sapiens)
atgaagaatattaagttaaaaagtttggtttttaaatttttttttatttttatttaaagtaaaatatattttttatggtaatttagtatatgtatatatacgtttataattaagataaatattttatagattaatatttattttgtgtgtaatgggttttggaatttttaattttattatagtttattttatttatttatttatttatttttgagatggagttttatttttttagttaggttggagtgtagtggcgtgattttagtttattgtaattttcgttttttgggtgagagtgatttttttgttttagtttttcgagtagttgggattataggtgcggttattatgtttagttaatttttgtatttttagtagagaaggggttttattatgttggttaggatggtttcgattttttgatttcgtggtttgttcgttttggttttttaaagtgttaggattataggcgtgagttattgtatttagttagtttatttttattatagtggtttttattaattagaaggattttttgatttattaataggttataatttatagtttgtggattttttatttttatttagttttttaggttttggttgatgaacgggttaagttttttttttttaggttttagttttattagtttttttttgagaaattttgattagtttagattttttatgttagcgtttggtggatatttggaataaatgatttttttattaaggttttttgtagattgaagagtttgggtattaatgttatatgtgttttagattgttttaatgaattaatattttagatttatttattgtaaatgttggtattgaagtaagtatagaaggtcgttaggtattggttatatgttgaatattttttttttttgatgtttataatagttttgttggatggatgttagttttatttggtaaataaggggttgagggtttttgatttgtttttttttttgttttgttttgttttttttatggagttttgttttgttttttagatttttggttggagtgtagtggtataattttggtttattgcgatttttattttttaggtttaaaggattttttcgttttagttttttgagtagttgggataataggtgcgtgttattatatttagttaatttttgtatttttagtagagacgaggttttattatgttggttaggttggttttaaatttttgattttaagtgatgtattcgttttagttttttaaagtgttgggattataggcgtgggttattttatttggttttcgattttaattaagttgtttaagattataaatttttaagtggtagaatttggatttgagtttgggtttttagtttaagatttttagtatattatgaagttttttacgagtatttattattttagttatatttgtttgtttacgggtattttggggaatggatattatattttttttatatatttaagattagttatgtagtttgtggagtttagtgtaaattgaagtattttgagttttttatttaaaaattttgaatttgaagatagtaatagaaaagtattaaattaagtataggttttttgtaagtgtagggttatttgtgattgtataggttatttatttatgtggtgggtgatttgtaagtaatttttttagtttatattattttgtattattatttttttattggttaatttttttttttttttggagatttagtttaaatattattttttttaagaagttttttttaattgtatttagttttaagttatattaagtttttttggttttttaaggtattttgttttggtatttattagattatgttatattattttggttattgtatgatttttatttttttatttttgatttttatatgttagattgggagttttttaaaggtagggattgtgttttttagttttgcgtttttagaatttaaatattgggatagatattttgtaggtgtttaaagagttttgtggaatgaagtagaggaaaattagatttggtgaggaggaatagtaaaatttagttcgaaggaaggtaggttattggggagtagttaggtagatgaaggtattaaagagagagggttgaggaagaggagttatgggtgtgttagggatttggtgatggtgaggattatagttagttaaggtaggataaggagtattgttaataaattgattaatttaagaaggttttttggagtgggagttttatatgtttttaagaagtgatttggggtttaggaatatataaatagatttaatttgtttatacgtttttttttgggagttaaggaattgggttgtgataagttagggaagtatagattttttgtttttttgtttagttttcggttttagttttttttagaaattataggtatggtggtttaagtttataattttaatattgtgggaggttgaggcgggaggatcgtttgagttcggaagtttaagattagtttgggtaatacggtgaaatttcgtttttattaaaaaaaaaaatttatatatatatatatatatatatatatatatatatatatatatatatatatgaaaattagttaggtgtggtggtggcgcgttaatagttttagttatttgggaggtggaggtgggaagattatttgagtttaagaatttaaggttgtagtgagtcgagattgtattattgtattttagtttgggtgataaagtaagattttgttaaaaaaaaaaaaaaaaaggaaggaaggaaggaagggaggaaggaagggaggaaggaagggagggagggagggagggagggagggattagatttgtgatttatagtaggttgatggtattattttttaagaagttgattaaattgttttttgaggttagtgggagttttttggtagtgacggttcggtttatagatttggggtttgaaaagggttttggtagttggttaagggtatttattatgttgaagttttttttttttagtatagttttttttttattttttatttgatggagtgtttttgatgttatttgatttgttcgggatgatattcgttattatgtaggataatttagttgattagaagtagagagaaattgtgggggtagtggtttatttttagtttggatagtttgtaggtgtaatgagttgattttataattattatagagtgtaataattataggttagtttttttttttgatttgaggttattgttgttaggttagttatgtggttggttagattaagggttagtgtgattgtgaagtagtattatgagaggggtaaaattaaggaatagattgtatgagtttttgggttttttttagttttaatattttatggtgatggtagttttgtttttttttgaagattttaaaatgtttgatatttgtgttttttcgtattgttttgggaaggagaataaggatggtgagagatgggcgtgggatgtagaggatggtggtgtggttttgagagataggtagtattggaaagtgtttgttggggagggaaattttgttcgtagaagttaaggttttttattttgaaattataggttgtagattttattgtgtttagtcggttagtgaaagggaaagtttatatggtttataggggtttatggtttatatatgattagattttattgttagaattttaaatgtgttatatttatatttttaagtatttttttgtgtggagtgataatggtggtagttgtagtgggatatagagatgggttatatatgatttttgtttttagagaaattattttatagtaggaaaatatgtatatagttttaggggtggggaggggggttgttagaaagtattggttttgtagagttagatgtggatgtgaagtttagttttgtgtcgtttagttgggtgatttttggtaagtgatttaattttattgaattttagtttttttattggtgaaatagggataaaaaatagcgttttttttatagatttgtgatgagataattatgtaaagttttatttttttttatggatgaggtaaagtaaaggatatttaaaaatattaaattatatttttttgtgtgtgttttatataattaaggttttttgtttttaaaaaaaataaaaaataaaataaaaaatagaggtcgggtacggtggtttatatttgtaattttcgtatttcgggagattaaggtaggaggattgtttgagtttagtagttcgagatttgtgtgggtaatatggtgtaattttattttgtagaggcgaaatttttataaaaaatataaaaattagttgggtaaggtggtacgtgattgtagttttagttatttaggaggttgaggtaggaggatcgtttgaatttaggaggtcgaggttgtaaagttgagattttattagggtattttagtttgggcggtcgatcgagattttgttttaattaaaataaaataaatttttgaaaaatagacgtaggtgttttttggatgttttgttgttttttgatatttgtcgtataatttgtaatgatgtgatttttgcgatttttttttattgtttgttttttttttgtttatagtaagttttttgggggtaagggcgggtcgttttgtgtcgtattttgtttttagcggagattcgtttcgtttggaacggaagttggcgtatagaaggttttttagaaggtcggtgtgtgtgttgcggtagaaggtagaggtcgaatgtggtcgcgggtggcgtgttgagcgcggagggggtcgtgggattcgggaatttgtgtaggcggtggagaggggcgtagcggttttgtttcgtgcggttcgtagatggcgttgtaggttaggttttcgtcgcgcgttagtttggaattcggaagcggtagcgcggcgcgattcggcgggcgggttttgggcgcgggaatttcggcggatttcgggcgggcggatgatttttagttttatttttggtgtcgttttttttttttttttttttttttcggtagttagcgcgtttgtgttttttttaggaaggggtaggggaggggcgtttggagaggatttttcgcgaatgtttacgtgacgtgtagtttttttggggttgtttcggtttgcggggaatatgggcgtgtttagggtcggattgtgttttggttttatcgaggagatgatttagttttttaggagttataggattaagataggtgatcgggtgtgcgcgtgttagggagtcgcgcgggtttcgtataatttgggtaggtttcgagggttggcgtattgttttggtatatttgtagggcgttttttttttatttttagagggtcgcgtttttggagaggtttaggaagggtgggcgtggggagttaagttttaaaatagggtagagatttttattgtgtgtagggtatcgcgtcggtttttgtagttttgttattttatattggttttttgagacggtttgtcggggggtagaattgatattttatttgatagatgaggaaaaattaagtgtgggaggttttagttttttttgttaattcgttatacgtgttttgtttttagt

SEQ ID NO: 82 - DNA, 5567 bp, Artificial Sequence
  chemically treated genomic DNA (Homo sapiens)
attgaaaataaaatacgtatagcggattggtagagaggattggggttttttatatttggtttttttttatttgttaaatggggtgttaattttatttttcggtaggtcgttttaggaggttagtgtgaaataataaagttgtaggagtcggcgcggtgttttgtatatagtaggaatttttattttgttttagagtttggttttttacgtttattttttttgagtttttttagaagcgcggttttttaggaatggaggggaagcgttttgtaggtatgttagggtagtgcgttagttttcggggtttgtttaggttgtgcgaggttcgcgcggttttttggtacgcgtatattcggttatttgttttgattttgtggtttttgagaagttggattattttttcggtaaggttagggtatagttcgattttgagtacgtttatgtttttcgtaggtcggaatagttttagggggattgtacgttacgtgggtattcgcggggggttttttttagacgttttttttttatttttttttagagaggatataggcgcgttggttgtcggaggagaaaggagagaggaggaggcggtattaagggtagggttgggggttattcgttcgttcgggattcgtcgggattttcgcgtttagagttcgttcgtcgggtcgcgtcgcgttgtcgttttcgggttttaggttggcgcgcggcgaggatttggtttgtagcgttatttgcgggtcgtacggggtagagtcgttgcgtttttttttatcgtttgtataggttttcgagttttacgatttttttcgcgtttaatacgttattcgcggttatattcggtttttattttttgtcgtaatatatatatcgattttttaaagagttttttgtgcgttagttttcgttttaaacggaacggattttcgttggagataaaatgcgatataagacgattcgtttttatttttagggagtttattgtgagtaagggaaagatagataatgaaaaggaatcgtagaaattatattattatagattatacgataggtgttaagaagtagtaaagtatttagagggtatttgcgtttattttttaaaagtttgttttgttttggttgagatagggtttcgatcggtcgtttaggttggagtgttttggtgagattttagttttgtagtttcgattttttgggtttaagcgatttttttgttttagttttttgagtagttgggattatagttacgtgttattttgtttagttaatttttgtattttttgtagaggtttcgtttttataaaatggggttatattatgttgtttatataggtttcgaattattgggtttaaataatttttttgttttggtttttcgaagtgcggggattataggtgtgagttatcgtgttcggtttttattttttattttattttttattttttttaagggtaagaaattttggttatatagaatatatataaaaagatatgatttggtatttttaaatgttttttgttttgttttatttataggaagaaataaaattttatatggttattttattataaatttgtgagggaggcgttattttttatttttgttttattaatgaagaaattgaggtttagtgaggttaaattatttgttaaaggttatttagttaggcggtatagggttggattttatatttatatttgattttgtaaagttagtgttttttaatagtttttttttttatttttgaagttgtgtatatgtttttttattgtaaggtggtttttttgagagtagagattatgtgtggtttatttttgtattttattgtaattgttattattgttattttatataggaaagtatttgggagtgtgggtgtggtatatttagaattttagtagtgaagtttgattatatgtgagttatgaatttttatgaattatgtgggtttttttttttattaatcgattgggtatagtggagtttgtagtttatggttttaggatagagagttttagtttttacggataaagtttttttttttagtagatattttttaatattgtttattttttagggttatattattattttttatattttacgtttattttttattatttttatttttttttttagggtagtgcggaaggatataggtgttaggtattttgagatttttagagaagggtagggttgttattattatggagtattagagttggaaggggtttaagggtttatgtagtttgttttttggttttattttttttatgatgttgttttatagttatattggtttttggtttggttagttatatagttagtttggtagtagtagttttaaattaaggggggaggttggtttgtaattgttatattttgtgatgattatgaagttagtttattgtatttgtagattgtttaaattaaaggtgggttattgtttttatagtttttttttgtttttggttagttgggttgttttgtatggtgacgggtgttatttcgaataaattagatggtattagaggtattttattaagtgggagatggggaggaggttgtattgaagaaagaaaattttaatatgatgaatgtttttgattaattgttaaaattttttttaaattttaagtttatgaatcggatcgttattattaaaggatttttattagttttaaagggtaatttggttaattttttggaggatgatattattaatttattgtaagttataaatttggtttttttttttttttttttttttttttttttttttttttttttttttttttttttttttttttttttttttttttttttttttttgataggattttgttttgttatttaggttggagtgtagtggtgtaatttcggtttattgtagttttgaatttttgagtttaagtgatttttttatttttattttttaagtagttgggattattgacgcgttattattatatttggttaatttttatatatatatatatatatatatatatatatatatatatatatatatatataaatttttttttttggtagaaacggggttttatcgtgttgtttaggttggttttgaattttcgggtttaagcgattttttcgttttagttttttatagtgttgggattataggtttgagttattatgtttatagtttttaagaaaggttggagtcgagggttgggtagagagataaagaatttatatttttttgatttgttataatttagttttttgatttttagagaagagcgtgtgggtaggttggatttatttatgtatttttgagttttaaattattttttggaggtatatggagtttttattttaggaggtttttttggattagttagtttgttgatagtgttttttattttgttttgattggttgtggtttttattattattaaatttttgatatatttatggttttttttttttaattttttttttttggtatttttatttatttgattgttttttagtagtttgttttttttcggattgggttttgttgtttttttttattaagtttggtttttttttattttattttataaaattttttgagtatttgtaaggtgtttgttttagtgtttaagttttgggaacgtagagttggaaagtatagtttttgtttttaaggagtttttagtttggtatgtggaggttaggggtgaaaggatggggattatgtaataattagaatgatatagtatggtttggtaagtgttaggataggatgttttgagggattagaggggtttagtatagtttgagattgggtgtagttgaaggaggttttttggaggaagtgatatttgagttgagtttttaaggaaggaaaggagttagttagtgaaggggtggtggtatagggtgatgtgggttgagggaattatttgtaggttatttattatatgggtgaatgatttgtgtagttataaatagttttgtatttataaggggtttgtgtttagtttaatgtttttttgttattatttttaaatttagaatttttgaataaggggtttagggtattttaatttgtattgggttttatagattatatagttggttttgagtatgtgagagggatgtggtgtttattttttaaagtgttcgtaagtaagtaggtatggttaaagtgatggatgttcgtaggaaattttatggtatattgggaattttggattagaagtttaaatttagatttaagttttgttatttagagatttatggttttagataatttaattaagatcggaggttagatggggtagtttacgtttgtaattttagtattttgagaggttgaggcggatgtattatttgaagttaggagtttgagattagtttggttaatatggtgaaatttcgtttttattaaaaatataaaaattagttggatgtggtggtacgtatttgttgttttagttatttaagaggttgaggcggaagaattttttgaatttgggaggtggaggtcgtagtgagttaagattgtgttattgtattttagttaggggtttgggagatagagtaaggttttataaaaaaaataaaataaaataaaaaaaaaaatagattagggatttttagttttttgtttgttaaatggggttaatatttatttagtagagttgttgtgaatattaggaggaggagatgtttagtatgtagttagtgtttagcggttttttgtgtttgttttagtattagtatttgtagtaagtgaatttgaaatattaatttattaggataatttaaagtatatatgatattaatatttagattttttagtttataaaagattttggtgggggaattatttattttaaatgtttattaagcgttagtataggggatttgggttaattaggattttttaggaggaggttgatgaggttggaatttggggaggaaaaatttggttcgtttattaattaagatttgggaggttggatgggagtaagggatttataaattgtggattgtgatttattaatgggttaagaagtttttttagttggtgaagattattatgataaaaataaattggttgggtgtagtggtttacgtttgtaattttagtattttggaaggttaaggcgggtagattacgaggttaagagatcgagattattttggttaatatggtgaaattttttttttattaaaaatataaaaattagttgaatatggtggtcgtatttgtagttttagttattcgggaggttgaggtaggagaattatttttatttaggaggcggaggttgtagtgagttgagattacgttattgtattttagtttggttgagagagtgagattttattttaaaaataaataaataaataaataaaataaattataatagaattggaaattttagagtttattgtatatagagtaagtgttggtttgtgaaatgtttgttttagttataggcgtatatatgtatgtattaagttgttatggaaagtgtattttattttgggtaaaggtaaaaaaagatttgaaagttaaattttttggtttggtgttttttat

SEQ ID NO: 83 - DNA, 5102 bp, Artificial Sequence
  chemically treated genomic DNA (Homo sapiens)
tttatatatttattatttttggtgatttttatttttttttatagattgttgggtgttatttatttttatttttatgtatttatttatttttttagatggagttttattttgttatttatgttggagtgtaatggggtggtttttgtttattgtaatttttattttttgggtttaagtgattttattattttagttttttaagtagttgggattataggtgcgcgttattatgttcgggtaattttgtatttttagtagagacggggttttattatgttggttaggttggttttgaatttttgattttgtgattttatcggttttggtttataaaagtgttgggaattacgggtgtgatttattacgttcggtttatttttattttttggtatagggttttaattttgttatttaggttggagtatagtggtataattatagtttattgtagttttaattttttgggtttattgattttttttattttagttttttgaatagttgggattataggtatatattattacgtttagttaatttttttttttttttaagataggattttgttttgttatttaggttggagtataagagtatgattttagtttattgtaatttttattttttggggttaagtaatttttttattttagtttttttagtaggtgggattataggtatatttattatgtttggttattttttgtattttttgtagagacggggttttattatgttatttaggttgtttttgggtttaagcgatttgtttatttttgttttttaaagtgttggaattatagggatgagttattaagtttagtttgttattttttttagtgtgaagaattttttttagtattttaagtttggtggggatgaatttattgtttttgttgattttaaattgtattttgttgttattttttttttttttaattaaaggttgggtatagtggttgatttttataattttagtattttgggaggttaaggtgggaggattgtttaagtttaggagtttgagattattttgggtaatatattgagattttgtttttataaataattaaaaaattaattgggtatggtggtgtatgttcgtggttttagttatttgggaagttgaggtgggaggtttgtttgagtttaggaggttaaggttatagtgagttgtgatggtattattgtattttagtttggatgatagagtaagattttgtttgaaaaaaaaaaaaaaaaaaagatttattgtaatgttatattattttaatgtaatttattattttaatatatagaatgtttttattttaggttgggtatggtggttaatttttataattttagtatttcgggaggttgaggtagaaagattagtttaggagtttgaaattattttgggtaatatagtgagatttttaattttataaataatttataaaattagtcgggaatggtggtatatgtttatggttttagttatttgagaggttgaggtgggagattgagtttgggaggttaaggttgtagtgagttgtgatagtgttattgaattttaggttggataatatagtgagattttgttttaaaaatttttttttatgttttttgtagaatttttttttgaagaatagtttttgttttggtaggtagttaatttggttagatttttaattttaaattaattatttttagtagagggtagaagttaaaatttttatttagttttattttttagttgttgtttttttttttttttttttttttgttgggttttttgttatttttatatatgtatacgtaagtagttaattaaggaattgggaggatttgttttatttaaatgttggggtttattttttttgtaatatttttttttttaggattttttttgtaattttttggttgttttgtttgttttaaattttgttttttgatttgttttaaattttgttttttgatattttaaggtagtaaagttgtgtttttttattagagtttttatataggtagtaattttgtgttatttaagagttttttgtagattggggaatgttttaagtaagaggttatagtttttttaattttattagttgtagttgttttttaagggtaggtagatttttttttggagtttgtttaaatttggttattgtttagtgttttggaataattggttttttaaaatatttttttttttagagtttgtaattgttatttgtgggagggttaatttgattatatttatttgttattattggaaattagaattagaaatatttatttattatttttgaaatggagtttcgttttgtcgtttcggttggagtgtagtggtgcgatttcggtttattgtaatttttttttttgagtttaagcgatttttttgttttagttttatgagtagttgggattataggcgtttgttattacgttcgtttaatttttgtgtttttagtagagacggggttttattatgttggttaggttgttttcgaatttttgatttaaagtgattcgttggttatagttttttaatcgattaatatttaattaaaacgatatttttttttagaattttttttttttttttttgggacggagtttcgttttatcgtttaggttggagtgtagtggtacgattttagtttattgtaagtttcgtttttcgggtttacgttatttttttgttttagtttttcgagtagttgggattataggcgttcgttaacgttttcggttaattttttgtatttttagtagagacggggttttacgtgttagttaggatggtttcgattttttgattttgtgattcgttcgtttcggttttttaaagtgttgggattataggcgtaagttatcgcgttcggtttagaattttttgttttgagatagggttttgttttgtcgtttaggttggagtgtagtggcgcgattttggtttattgtagtttgattttttaggtttaagcgatgtttttaagtttagcgtttgtaatagttaggattatagttgtgtattattatgtttggttaatttttttgtagatatggggttttttcgtgttgtttaggttgatttggaagttttgggtttaagtaatttttttgtttcggttttttaaagtgttggaattataggtgtgagttattatgtttgattttagaatttttgataattttgtgaggatggtttaagttatatttaggtgtgtgattttgtataagttattagtttatttaggtttgtttttttatttataaaatggggataaaaataaatttattttatagttatgagtattatatgaattgttatattttagaagtttagaaatgtttggtggtaaatgttataaatatatttttattattattagtgagtatttaggttgtgtatgttattgttgggtgttttacgtatattaatttatttgttagaatagttatgggggggaggtattattataatgttattttagatatgaagaaattgacgttttgagagattggatgattaaatttttgattttaaatataacgttttttttaacgcggtttggttttggagaggaaggtagttttttttaagatatttttgagcgagaaagtcgcgttattcgggggtttttattgttcgagttcgttacgtggtagtttgggtcgaatgtttttttttattttttgggtgggcgaggtttgattttaatttcggtttttcgttttagatttggtattattgtagatttaatttaaatttttagaaatgtgtcgttttttataatttttagttgtttattataggtggtaatttttttgttgtttaatgtggcgtaaatttttttttttatagttgcgggattatagtttatcgatttgggataaatattcgagacgggtcgaattttagttcgtaggtagtaatttcgtttttttttttttcgtttcgtcgcgtttagtttagtttttttagttttgtttcgtttttttagtttaatcgttttttattgttggtttcgttttttttcgtttcgtttagtttttttcgtttcgtttcgtttttttcgtttaattgtttttcgttgttggtttcgtttcgttttttttttttcgtttaatcgtttatttttgttggtttcgtttttttatttaagttacgttttttagtaggttaatttagtttttttagttttagagtttagattttttattgggcgtagtattattttcgttttttttttgggtcgcgagcgtcgaatttatcgaacgtagttaatgggtgatacgacggtagcgcggcgggaggttcgattgattcggttttggcgggtcggtgagttttggcggttgttaacgcgcgttttgggaataggaaggttgagagagaggtgttggggtttgcgtttatttttgtcgttttttttagttttttttggtattttttttttaatttgggttttttatacgttcgcgtggttttttgttcgatttttttgagtttgattttggtttttatttttagttttgggaaattttttttttttagattcgttttttttattcgggtttcggatttttattttagttttttttttttggttagtgattatttatttttaattttatttcgtttcgtcgcgtaattattttttttttttattcggattgggattattatttttattttatttcgtttagtttgggattttatttgttttttttttaattttatattaatttttgtttggtttttttttttttggtttaatttttcgtttcggtttattggggacggttatttttatagtttggttttaaatattagtttttggatggattttcgttatttatgttttttttttaattagtcggtttttttaataatgtagtagttttttttatagattagattttggttttatatttttagtcgttgtttgtttttgatttttggtttatgggtatttgacgttttaaatttttaggtttaggatggtaagtgtgggtttaggggagattgggaatagttttgggttagggtttagtaggtttaggttgtaggatttttgtaggtattgtttttgttttttttttataga

SEQ ID NO: 84 - DNA, 5102 bp, Artificial Sequence
  chemically treated genomic DNA (Homo sapiens)
tttgtaaagggagaatagaaatagtgtttgtaaggattttgtagtttaggtttattagattttgatttagggttatttttagttttttttaggtttatatttattattttgggtttaggagtttaaaacgttaagtatttatgagttaaaggttaaaagtaggtagcggttaagagtgtaggattagggtttaatttgtagagggggttgttatattattgagaggatcggttaattaaagagggggtatggatggcgggaatttatttaggaattggtgtttggaattaaattgtgagagtggtcgtttttaataagtcgagacgagagattaggttaaagaggaagagattaagtagagattagtgtgggattggggaggaggtaggtggagttttagattgggcggagtggagtggggatgatggttttagttcgggtgaagggaggaggtagttgcgcggcggggcggggtgggattgggggtgggtaattattggttaggagagagaagttggggtgaaagttcgaggttcgggtggggagggcgagtttggagaaaggaaattttttagggttggaggtggaaattaggattagatttagggaggtcgagtaggaagttacgcgggcgtgtaaaaaatttaggttaggaggggaatattaggaggggttgaaaagagcgatagagatagacgtagattttagtattttttttttaatttttttgtttttaaagcgcgcgttaatagtcgttaagatttatcgattcgttaagatcgggttaatcgaatttttcgtcgcgttgtcgtcgtattatttattggttgcgttcgatgagttcggcgttcgcgatttaaggaagaggcgggaatagtgttgcgtttaatgaggagtttgggttttggagttggagaagttaaattgatttattaggaggcgtgatttagatgggagggcggggttaatagaggtgggcggttgggcgagaagagaggggcggggcggggttaatagcgaggagtagttgggcgagaagagcggggcggggcgagaagagttggacggggcggggaggggcggggttaatagtggggagcggttgggttagaggagcggggtagggttagaagagttggattggacgcgacggagcggggaggggaggggcggaattattatttgcgagttggaattcggttcgtttcgggtgtttgttttaggtcggtgagttgtggtttcgtagttatggaagggaagatttacgttatattgagtagtaggggagttattatttgtagtggatagttggggattatgaaaggcggtatatttttgggagtttggattgaatttatagtggtattaggtttagagcggagggtcggggttggagttaggtttcgtttatttagaaagtggggagaggtattcggtttagattgttacgtggcgggttcgggtaatgggagttttcggatgacgcgattttttcgtttaggggtgttttgaaagaagttgtttttttttttaaggttaaatcgcgttggaggaagcgttgtgtttggagttagagatttaattatttaattttttaaaacgttagtttttttatatttaaagtggtattataatagtattttttttttatggttattttgataagtaaattaatgtgcgtaaagtatttaatagtggtatgtataatttaggtatttattaataatgataagggtgtatttatagtatttattattaggtatttttgagtttttaagatataatagtttatgtaatgtttatgattatgaggtaggtttatttttgtttttattttgtaagtgaggaaataggtttagataggttagtaatttgtataaggttatatatttgagtatagtttaagttatttttatagggttattaagaattttgaggttaggtatggtggtttatatttgtaattttagtattttgggaggtcgaggtaggaggattgtttgagtttaggatttttagattagtttgggtaatacggagaaattttatatttataaaaaaattagttaggtatggtggtgtatagttgtagttttagttattgtagacgttgagtttggaagtatcgtttgagtttggaaggttaagttgtagtgagttaagatcgcgttattgtattttaatttggacgatagagtaagattttattttaaaataaagaattttgggtcgggcgcggtggtttacgtttgtaattttagtattttgggaggtcgagacgggcggattataaggttaggagatcgagattattttggttaatacgtgaaatttcgtttttattaaaaatataaaaaattagtcgggagcgttggcgggcgtttgtagttttagttattcgggaggttgaggtaggagaatggcgtgaattcgggaggcggagtttgtagtgagttaagatcgtgttattgtattttagtttgggcgatagagcgagatttcgttttaaaaaaaaaaaaaaagaattttggagagaaatatcgttttaattaagtattaatcggttgggaggttgtggttagcggattattttaggttaggagttcgagaatagtttggttaatatggtgaaatttcgtttttattaaaagtataaaaattagacgggcgtggtggtaggcgtttgtaattttagttatttatgaggttgaggtaggagagtcgtttgaatttaggaggggaggttgtagtgagtcgagatcgtattattgtattttagtcggaacgatagagcgagattttattttaaaaataataaataaatatttttggttttagtttttagtaatagtaaataaatgtagttagattaatttttttataaataataattataaattttagggaaaaaaatattttgaaaaattaattattttagggtattggatagtggttaaatttaagtaggttttagaaggaagtttatttatttttaaagaataattgtaattggtgagattagaaaagttgtggttttttatttagggtattttttaatttgtaaggaatttttgggtgatatagagttattatttgtgtgggaattttggtgggaagatatagttttattattttgaggtgttaggaaatagagtttgaggtaggttagggaatagagtttgaggtaggtagagtaattaaaaagttataggagaaattttaaaaaggagagtattgtagagggggtgagttttaatatttgggtaagataagtttttttaattttttggttgattgtttacgtatatatgtgtaggggtaataagaaatttagtaaaaaaagaaaaaaaaaaaaaagtagtagttagaaggtagaattgggtgaagattttggtttttgttttttgttggagatgattgatttggaattaaaaatttagttaaattagttgtttgttagaataaaagttgttttttagagaaaaattttgtaaagggtataagaaaaaatttttgagatagagttttattgtgttgtttagtttggagtttagtggtattattatagtttattgtagttttgattttttaggtttagttttttattttagttttttaagtagttggaattataggtatgtgttattattttcgattaattttgtgaattatttgtagagttgggggttttattatgttgtttaggatggttttaaatttttgagttaatttttttgttttagtttttcgaagtgttgggattataggaattagttattatgtttaatttgggatgaaaatattttatatattgagatgatgggttatattgagatgatgtggtattatagtaggttttttttttttttttttttttaaataggattttgttttgttatttaggttggagtgtagtggtgttattatagtttattgtagttttgattttttgggtttaagtaagttttttattttagttttttaagtagttgggattacgagtatgtattattatgtttagttaattttttgattgtttgtagagataaggttttagtatgttatttagggtggttttaaatttttgggtttaagtaatttttttattttagttttttaaagtgttgggattataggggttagttattgtgtttagtttttaattaaaaaaaaaaaaaatgataataaaatataatttaaaattaataaaaatagtagatttatttttattaaatttgaaatattaaggaaaattttttatattaaagaaaataatagattaggtttggtggtttatttttatgattttagtattttgggaggtagaggtgggtagatcgtttgaatttaggagtagtttgggtaatatggtgaaatttcgtttttataaaaaatataaaaaatagttaggtatggtgggtgtgtttgtagttttatttattagggaggttgaggtgggaggattgtttgattttaggaagtggaggttgtagtgagttgagattatgtttttgtattttaatttgggtgatagagtaagattttgttttaaaaaaaaaaaaaaattagttgggcgtggtggtgtgtgtttgtagttttagttatttaggaggttgaggtaaggaggattaatgagtttaggaggttgaagttgtagtgagttgtgattgtattattgtattttagtttaggtgatagaattgagattttgtgttaaaaaataaaaataggtcgggcgtggtggattatattcgtaatttttagtatttttgtaggttaaggtcggtgggattataaggttaggagtttaagattagtttggttaatatagtgaaatttcgtttttattaaaaatgtaaaattattcgggtatggtggcgcgtatttgtagttttagttatttgggaggttgaggtggtagaattatttgaatttaggaggtggagattgtagtgagtagagattattttattgtattttagtatgggtgatagagtgagattttatttaaaaaaataaataaatatataaaaataaaaataaatgatatttaataatttataggaaggaatgaggattattaaaaatggtaaatatgtgaa

SEQ ID NO: 85 - DNA, 10279 bp, Artificial Sequence
  chemically treated genomic DNA (Homo sapiens)
ttggtgtttttgtgtgtatgtttaaattttttttttttataaggatattagtaagattggattagaatttattttaatgattttattttaatttaattaatttatttaaggtttgtgatggttaattttatgtgttagtttgattgggcgaagggatatttatatagttattaaaacgattttgggtatgtttgtgtttatatttttggaagagattagtatttaagttagtagattgagtaaagaagatttatttttattaatgtggatgggtattatttaatgtgtttaaggtttagatagaataaagaagtggaggaagggttaatttgttttttttaagttgggatgtttatttttttttgtttttagatattcgtgtttttggattttaggatttcgggtttggattgaattatattacggatttttttggttttttagtttgaagatagtagattgtgggattttttgatttttataattgtgtgagttaatttttgtaataattttttttttttatagtagatttttttataaaaataattagaaaatgatgttttttttttatttttttttagaagtattaattgtttataagttgaaagtgaatatagtttttaattaaaatttatgaaaaatttagtaattgtttttattatatataaaataaagttatatagttattatagtttaaatataattaaattaaattaaagttaaagtttttttgttttaaaaattaatttttttttatttttaaaaaaatattgtgaaatttgagagtttttattgaggtaaattgggtagttgtttagtttggttttttgtaaagatatttattggtattttgtaattaggtatttaggttattatgtttattgtagagttgagaaagtttattttttaaatttgtatattagttttgagaaatttaggttatgttttttttatgttaatgtttgaatttaatttgtgattttatggaggtaagtaggatgaggaggtaaaataatgttttattattttgtaaggtttggaaatggaatagatgttttttgattagaaaggatatttagtaattttatatatcggtttttatttttagttttttaaatttttttatgaagatatggtttttatatttttttttgtttgaggaataaggagaaggtatttattatatattttttgggattggttaggattagtaagataatgagaatggagttttgtgttgttttttgatttttgtggaagattggagttaatgaagtgtggggttttgtgtaaattattttgattttttaagtttttggttttgttttttagtttataggaattatgggggatttttataaaggtaagtgatggtggaagagggggtagggagaatagagattgggataaggggaagagggaagagaagagaagtaaatatatgatttttttttagttagtttatggatttaataatttttgagatttttttttatggttttttttgatagttaagaatataggtttttttttgtttatacggtggtattagttgtttagaaaatagtgtagttaaaattagaaagttcgtagtagattttttgaaagtatggagagtgagttgtagtcgacgtttagagtaattaataatatattagaaattttattaataggggtaatttatattgagttaattagaaaataattttaagatagagaaagtgggggagaaatgagcgtgtggagacgttgttttttcgtcgttagtgtagggtggcgagtttgtatgtttatttagggtttcgatttagcgacgatttgttaaggttttgttttattgttagtttgagtttttttatcgtttaagatgtattttggatgggttagggagggatgttttttttttagtgtagtggaaagaacgttgttttgggagttgggagatcggatttgtaatgttatttttgttattaatttttttttgtgatattgaataggaatattttgttttttaggaataaataaataaaatatatgcgttggggtaagtaatttttaagtttttttttagttttggtttttaaattggtgatgttagaagataagagttttgttagttagagatgtatagatatatgtttatgtatgtaattttaatgttcgtaaatagtatttgttgaattatgataagagtttaaaatgtagcgtttatatatttagattatggttgtaggagtagattttgattgttattagtaattggaatttattgttgtttgggaagagattgaatttgaaaaggttttttaaaagggtttttgggagttaaggggaataagtgtaggtaatttgtttaggggggttggggtttggatggagaggtaggtgaaagtagggatgtagggagtatattgtttggaggagtagggttagtgaagggtttgtcggtatttttaggattaattatagttaattattagtttgggaggtttgcgtttaaggttggagtttggtattaagttgtttaggttttagtttatttttttcgttttttgttttttgtaataattggttaatatatgttagtagtgttttatttttaatttgtttggaataatatggattttaggtagttttgtttttgttattttatgatgtaagttaaggtttgtttgttatgtggaaaagatttgaaataaagatagtggataaaatgttagtgtttagagggataatgggttattatttaatttgttttttttaggtgatttaagggaggttttattttttaataggagataagtgatttgattttaatacggatgggagaaattgggaggtgaaattgggagaaatatggaaatattggtgatgtatataaatttagatttttattaaatagagtaattagaaaattgtatttttataggtatttaatattttgttatgttttatttaaaatttattaagtattttatttgtaaatattgtgattttttttaattataaaagtatatatgattgatgaaaaattgagtaatatagaaatttatgttaaatatgatttgaagagagagagagagagagagaaagttttttttttatttggtttgaattttatatttttattattttttgatgagtttatttgattagtttatttttttaagaaaaattgaaaaggattttatttataaattattgattttagagaaattttttaattttgttttggaggttatgggtaattaattaattttgtttatcgtagattttcggtgttaaattaaggaaagtttaaaataaattagtgtattttgttattttagttttatataatttttaagtgaatttatagaattgaagtttgatttttgaatttgttgttttgttttaatattgtgggatattattattttgtttttttttttaaggggaagtatgaatatttggttttttttttttttttttgtaagtttattggagatgtaagattttaaggagtaggaggatggggggggaaggatatttttttgtatgtaagttatgttatgatttttttttatttgattttattgtgtaaggagggtttagggttatttgttgaatatgaatattgtttttaggaaatttttagtttttatttgtttttttcgttatgttgttttaaatatgatttttaggtaaaggttgtatttttttggggaaaaatatattgaagtttttagaagttatagattagtttttttttttttttagtgttattgtagtggtttttgttttgtttttagtgagtagttgtggttttagggttgttgtgtggttaagtaggtttaaatgcgaaagagtgggagatgtaagaggagcgtcgaatgagggtagtatagaatagtgaaatttttgtatttgtttttttgatagtttttgttgagaattagataagtaaggaattttttatttattagttgaatatagaaagattttggggataaagttggtttgagaattataaaggggttttgaaatagagatagaggtgtgtatatatttatttatttttgaattatttttagattattattataaagtggtttttattattttttttttatggtataatggagtgattaggaatatgagttttggaattttattttatttttattaagtagtggttgtgtgattatgggtaagttattttattgttttgaatttttgttgtttttttttagatataatattattaaatgcgtatgattgttgtgaaaattaaatgatatataaaatatttataagtttagtttattgtttttaataatggggattaatattattaattttaggttgtaggtgatgagattgaagtttttaaagtttaagtaatgaattaaaggtttgagttaagatttaaatttaggtttgttgatgtttatattcgagtaatgtttaaatttatagtagttataaggagtattaattttttttagtaagatttgattaggttgaaaggttttgagattgtttggataatattttaagataataataaaaaaattttatagtgttgttaatatttgatgaatatttataaagaggtagatatcgttttaagtatttttttataataattgttattgtataatattattgattttttgaggtatatattattagttttttttttttatagatgtggaattgaggtatagagatatagaattttggtaaaagttggggtttatattgattgataagattatttttaatttaaatatttttagggagggaattggtagttagtgttttagtaaattttcgtatatggttttatatttaggtttttttgagttaagttttttaaagagttaggtggtagttggagttggggttttttggtttatgattggttgttattatttgtggttagttttttatggtgggggaggttgggaaggatagtggaagttgataaatagtttagtagtatgttttgagaaataagagggtaaggagagagtagagaatatattttgttttttttttggtattgagtaatattaattaaattgtagatattttaatattttggttaggtagtttgttgagtaaggtaatatttatattttttatgttttgagttaaaatatttattatatttttatgtttttaattagaagtgtttgagtttttttttttttttagttgatgaggggatgaaatgagtaaagttatattaatttttttttaaatgtatgaaaataaaaaaggtataagagttagttttagggttattgaaggtttatagaaagatgtaaaatatttgaattattataaatgaatgttattgttagaggaaaggtttaaggagtgttttttgaatgaatgtgtataaattagtagaaggtaaggtgtgagatttttggaaatgaatattggtagtttaggtgagaaaaataattaggaatataatagggtgggaggaaatgtatggttttttaggtattaataagtattgttaggtattttttgaattagattggtttaagtaggagattaatgttttttaaaatatttatttattttagaattattgaatgtttaaaaatgtaatttttggatttttttttaaatagttagattttttgggatttgatgatttgtatttttttttaaaaataaattcgtttatgattttgatttgtattaattttgagaattgttatggtagagattttgttttgaggttatgtttttgagttaggatttttggttagggattgtgatgatatatttttttttttgaagtggtttatgtaagaggttgtttgaaggaagagtaagaattgtagtgttattttgtggatatttgagatttataaaaaggttttttattttgttatatttttgatatatgatgtttggtaaaaaatagacgatagtatttgtagagtgaatgaataagtggaataggtgtgataatgagaggttatatttgagtatatagttattatttggaaattgtgtatagattaagttgaagatgttaggagggaagattgtgggttaagtaacggggtgtatgtgtgtgggtatagggtgggtagttgggatggaaatggggggttgttgttgttgttgtattttggttttttgaattaatgatattatttattagaaattattgtttttgtattgtttaagttattttaaattagtttgttaaaatgaatttgtgttgtgtggagggaggtacgtttgtagttttgatgttagatggtaatgtcgagatggtagtggtcggtggggatagggttgagtagtattaattatttagtttttgagatttcgaggttggtttattgttgagattttttgttagaagagaggagattaagtatttgtaaggtttttgagtgttaaaatatgaatttaagataatttttttataattttaattttatgttgtttataggtttatattttagtttgttttttttatgtttattcgaaaagaaagaaaagttaagggtggtggttatatttgaaattagttagattttaagtttttttgggggaaatttagaagaaaatatggaaaagtgattatgagtatatatatagttagtttttaaaatagttttatttaaaataaatgtattataaaattaataaaaatagttatttgtttgttttgaataatttaaatgatataaaaattaataaaataaaaagtgtaaaaggtttttttattaatgttaattttattttttttagaaattaaatattgttaagattttagtgtgtatttttttagaatttttgtgattttatatatgtataaatataaacgtatttatataaagggaattttattatatttgttattgttattttattttttgtttttttatgtgagtatttttttatgttattgatgtatatagaaattgtatatatgtattagtgtatatagaaaattaaattttttgtatggttttttattgtatgtttggattatagtttatttaataataatgttttttgggtaattatttatattgttttttgtttttttaaagtaatagtttttgaaataaatttttttttgtttttatataaatattgttgtatttttgtggaaatgtttttattggataattttttaaaaggagatttattgtattaaagataatatatttaaaaattttaaagatattgttaaattgtttagtaggtattttatattaatttatattttttttaagaatgtatggagatattttaatttttttatgtttttattaatgttgaattatataagtagttttaatttttgttaattgaatagataaaaaatatttaatttaagtttagtttttaaaagttttattttttattaaaagtaatatacgtttattttagggagtaaaaattataagtaaggataaaaaatagtgtagtaataaatataggagtgtagatgtttttgaatatattgatttaattttttttggataaatatttagtagtaggattgttggattatataataattttatttttagtttttttgaggatttttatattattttttatagtggttgtattaatttatatttttattaattgtgtatgaaggtttttttttttttatatttttgttagtatttattattgtttgttatttggatataatttattttaattggggtgagatgatattttattgtagttttgatatgtatttttttgatgattagtggtgttgagtatttttttatatatttgtttgttatttgtatgtttttttttgagaaatgtttatttagatattttatttattttaaaatcggattattagattgttttttgtagagttgtttgagttttttgtatattttggttattaattttttgttagatgtatagtttataaatatttttttttattatgtggattgtgtttttattttgtggattgtttattttgttgtgtagaagtttttaatttgatgtaattttatttgtttatttttgttttggttgttttttataggagtatttaaataaatgtagtttggtagattttggtatagtaatgtaggttagtgggagttaggggagaaatgtgtagggaagtgagatagttttaaggattttataaatatgttttatgattgatttatttaatgtgaaagttaatattaaatttgatgagttttagagatggttatgtattttaaaaagaattatttaaaatattgttttggaatattagagagtaagtgttttaagtataggttgggaagtaaaatgttaaaggaatgagaaggtatttggggttgagtttaatttaagaggtaggggagttatagggaaagatttagtatttgttatagaagagaattaggaagtagaattgaattataagtaattttgaggtgttcgttgggttgtagttgaaatattttttgaggttaatgagatatttgaaatggtcgtgtattgtttaatttttgtatagttttgtatagggaataatttaataggatttttttgtgaattaagttttagaaatttgtttttaatttttatgaaaaacgtttatttttttgtttttgagatagagttttgttttgttatttaggttgggttgtagtggcgtgattttggtttattgtaatttttgttttttgggtttaggtaatttttttgttttagtttttcgagtagttgggattttaagtgtttgttattatgttcggttaaatttttttgtatttttggtatagatggagtattattatgttggttaggttggtttcgaatttttgattttaagtgatttattagttttgattttttaaagtgttgggattataggtatgagttattgtgtttgtgttttaaaatattaatttttgatgtgtgatgtatgtaagatagaataaattttagtaaagcggggatttgaaaagaggttttggtaatagttgttagtattaatttttgttttttcgtattttttaattttatttttgtttaaagtatgtttatttgagaatttgtttttataattatgtgattataaaaatttttatcgattttgttagttgattaattgagggaaaaatatatgttatttgatataattggtgggttaaaagaattaatttaggtaaatttgagataggtggatgggatgatggattgaaaatatagttgttttttttttaattatgtattaagtaatttgggaaagattgatttaattgggtttagagagtatattttatatggtattgtttgattttttttttgtatcgttagcgatttgtgtattataatttaaattagtcgggttttttggtatatgtaattgttaatgttttttattagaagagaaatattatttttatttttttttattatgttataaattatagtgttaatgattatcgattaatagtgatttttaggatgatttgtgtgagttttatttgaaattatgtgaattttttattttaaaagttttttagaattttagtttatgtatatttaggtttgttgtaggtttagagtttcgtgttttttgtttttaatgtagatatagttttataatttataatagtatttattaattaaaattgtaagtataattattatttacgatatttattattagtttgtatttataaagtttaaaatttattttatttttttaagtagtgaataattagtttttttgggtttgtagttttattatttttttatgatttatttggaagaaataaataattaattttttggaagattgttttaaaaagttggaaatatattgtttagttagtataatgaggttaatataatgtggaaaatattatttttttttgattttagtagtttgtttatttttatatttattgaataaataattattgagtatttaatgtatattgggatttttggggaggtaaagatgaattaaagattttgtttttaaagattttaaggtttttgtggaaggaaataaaattttatatgtatatatttaagtatttatatgtgtgtaataggtataagtaattataaatattgttagaagaggaaataattttatgattagtatttaatatgatatattaaggtagaagatttaatatatattttttggaatatatgaataaataattgaatgtatttatttttattatttataagatatattagtgggatattgatattggttttaatatgatttgtttttattgtttttagg

SEQ ID NO: 86 - DNA, 10279 bp, Artificial Sequence
  chemically treated genomic DNA (Homo sapiens)
tttgagaataatgaaaataagttatattaagattaatattaatattttattgatgtattttataaataataaaaataaatatatttaattatttatttatgtattttaaaagatatgtattaaattttttattttaatatattatgttaggtgttgattatagagttatttttttttttgatagtgtttatggttatttatatttgttatatatatataagtgtttaaatatatatatgtaaagttttatttttttttataaaaattttaaggtttttaaggatagaatttttgatttatttttgtttttttaagggttttagtatatattaggtgtttaatagttatttgtttagtaaatgtaaagataaataggttattaaaattaaagaaaagtaatattttttatattgtattagttttattgtattagttggataatgtatttttagttttttaaagtagttttttagggggttggttgtttattttttttaaatgggttataaaaggatgataaagttgtaaatttaaagaaattaattatttattatttgaaaggatgaagtgaattttgagttttatgaatgtaaattaataataagtatcgtggatagtaattatgtttataattttaattagtgaatgttgttgtaaattataaggttgtgtttatattagaaataaaaaatacggaattttaaatttgtaataaatttgagtgtatatagattgagattttaagggatttttaagatgaaaaatttatatggttttagataaaatttatataggttattttgaaagttattgttggtcgatggttattagtattatagtttgtaatataataagaagaggtgggagtaatgttttttttttggtaaaaaatattggtaattatatatgttaggaaattcgattgatttgagttgtaatgtatagatcgttagcgatgtagaaaaaaagttaaataatgttatgtgaagtgtattttttagatttaattagattaattttttttaaattatttagtatatgattggaaagagagtagttgtatttttaatttattattttatttatttattttaaatttgtttgggttaatttttttgatttattagttatattaagtaatatatgttttttttttaattgattaattaataaaatcgatgagaatttttatagttatatagttatggagataaatttttagatgaatatattttgagtaggggtgggattaggaggtacggaggggtaagggttaatgttgatagttgttattaaagtttttttttaagttttcgttttattgaagtttgttttattttatatgtattatatattagaaattggtgttttggggtataggtatagtggtttatgtttgtgattttaatattttgggaggttaaggttggtgaattatttgaggttaggagttcgagattagtttggttaatatggtgatattttatttgtattaaaaatataaaaaaatttagtcgggtatggtggtaggtatttgaaattttagttattcgggaggttgagataggaaaattgtttgaatttaggaggtagagattgtagtgggttaagattacgttattgtaatttagtttggatgatagagtaggattttgttttaaaaataaagaaatgggcgttttttataaaaattaaaagtaaatttttaagatttgatttatagagaaattttattagattgttttttatgtaggattatgtaagagttaaataatatacggttattttaaatgttttattaattttaaaaaatattttaattgtagtttaacgaatattttaaaattgtttatagtttaattttgttttttaatttttttttgtggtaggtgttaggtttttttttgtggtttttttgttttttaggttgaatttaattttaaatgtttttttatttttttagtattttattttttagtttatatttaaagtatttgttttttggtattttaagataatattttgagtaattttttttaaaatgtatgattatttttagagtttattaagtttaatattgatttttatattgagtaagttaattataaggtatgtttgtaggatttttagaattattttatttttttatatattttttttttgatttttattggtttgtattattatattaaaatttattaaattatatttatttaaatatttttgtggaaggtaattaaagtaaaagtggataaatgggattgtattaagttaaaagtttttgtatagtaaagtaaataatttataaagtgaagatataatttatatgatgggagaaaatatttgtaagttatgtatttgataagagattaataattagaatatataaggagtttaaataattttataggaaataatttaataattcgattttaaaataggtaaaatatttgaatagatattttttaaaggaagatatataaatggtaaataggtatatgaaaaggtgtttaatattattgattattagagaaatgtatattaaaattataatgagatgttattttattttagttaaaatagattgtatttaaatgataagtaataatgaatgttggtaaggatgtagagaaaagggaatttttatatatagttggtaggaatgtaaattagtatagttattatgaagaatagtatggaggtttttaaaaaaattaaagatagaattattatatgatttagtagttttattattgggtatttatttaaaggaagttaaattagtatgtttagagatatttatatttttgtgtttattgttgtattattttttatttttatttgtgatttttattttttaaaatagacgtgtattatttttggtagaagatagaatttttaagaattagatttagattagatattttttatttatttaattagtaaagattaaaattatttatatggtttagtattaatgaaggtatggagaaattaagatatttttatatatttttgggaggagtataaattggtataaaatatttattagataatttagtaatatttttaaaatttttgaatatattatttttgatgtaataaatttttttttgggaagttatttaatagaaatatttttataggaatgtaataatatttatataaagatagagagagatttgttttaaaagttgttattttgaaaaagtaggaaataatataaataattatttaaagggtattattattaaataaattatggtttagatatatagtggaaaattatgtagaaaatttaattttttgtatgtattgatgtatatgtgtaatttttgtatgtattagtgatatggaaagatgtttatatgaaaaagtagagaatagaatgataatagtaagtatagtaggattttttttatgtagatacgtttgtatttgtatatatatgaaattataggaattttgaaaggatatatattaaaattttaatagtgtttaatttttgaaaaaaatagaattggtattgataagagggttttttgtattttttattttattaatttttgtattatttgaattatttaaaataagtaagtaattatttttattaattttgtgatatatttattttggataaaattgttttaaagattagttgtatatgtgtttatagttatttttttatatttttttttaaattttttttagaaaaatttaagatttggttaattttaaatatgattattatttttagttttttttttttttcggatgaatatggagaaagtaggttaaaatatggatttgtagatagtatgaagttaggattgtgaaagagttattttggatttatattttgatatttagaaattttgtaaatgtttgatttttttttttttaataaaaggttttagtagtagattagtttcgggattttaaaggttgagtggttggtgttgtttagttttgtttttatcggttattgttatttcgatattgttatttgatattagagttataggcgtgtttttttttatatagtatagatttattttgataaattagtttggggtggtttggatagtgtaggaatagtagtttttggtgagtgatattattagtttaggaggttagggtgtagtagtagtagtagttttttatttttattttagttgtttattttatatttatatatatatatttcgttatttggtttataatttttttttttaatatttttaatttagtttgtatataatttttaagtaataattgtgtgtttaagtgtgattttttattattatatttgttttatttatttatttattttgtaaatattatcgtttgttttttgttaaatattatgtattaaaaatgtgataaaataaaaagtttttttataagttttaagtatttataaaataatattataatttttgttttttttttagataattttttgtatgaattattttagaaagagaaatatattattataatttttggttaggaattttgatttaagaatataattttaaagtagggtttttattatggtaatttttaaaattaatataaattagaattatgagcgagtttgtttttaaaaagaaatgtagattattaggttttaaagagtttggttgtttgggaaggaatttagaaattgtatttttaaatatttagtgattttaaaatgagtgaatattttgagaaatattggttttttatttaggttaatttagtttaggaaatgtttggtaatatttgttaatatttgggaaattatatatttttttttattttattatgtttttgattattttttttatttgaattattagtatttatttttaagagttttatattttattttttgttgatttgtatatatttatttaagaagtattttttaaattttttttttgataatagtatttatttatagtaatttagatattttgtatttttttatgaatttttagtggttttaaaattggtttttgtattttttttatttttatatatttaaaaaaaaattgatgtagttttgtttattttatttttttattaattggaaagaaaaaaaagtttaagtatttttagttagaaatataaaaatgtaataaatattttggtttaaggtatgaaaagtatgagtgttattttgtttagtaggttgtttggttaaagtgttgagatgtttgtaatttggttgatattatttaatattaaagagaaggtaaagtgtgttttttgttttttttttgtttttttgttttttagaatatgttgttgagttgtttattagtttttattgttttttttagttttttttattatggagggttaattataaatgatggtagttaattatgggttaggagattttagttttagttgttatttggttttttaggaagtttagtttaggggggtttgagtgtagaattatgtgcgagagtttgttggggtattggttgttagttttttttttgagaatgtttgggttggaaatggttttgttagttagtataagttttagtttttgttagggttttatatttttgtgttttagttttatatttgtaaaaaggaaaggttagtagtatatattttaaagagttaataatgttatataatgatagttattataggaaaatatttgaaacgatgtttgtttttttgtagatgtttattagatattaataatattatggaatttttttattattattttgaaatgttatttaaataattttagaattttttaatttggttaaattttgttgaggaaggttgatgttttttgtaattattgtaagtttaaatattattcgagtatggatattaatagatttggatttaaattttgatttaggtttttgatttattatttaaattttaggaattttaattttattatttgtaatttaagattaataatattagtttttattattgagagtaatgggttaggtttgtaagtgttttatgtgttatttaatttttataatagttatacgtatttgataatattatgtttaaaaagaagtaatagaagtttagagtaatggagtgatttgtttatggttatatagttattatttagtgaaggtggggtggaattttaaagtttatgtttttaattattttattatattatgaaaggagaataatgaaagttattttgtagtaatagtttaaggataatttaagaatgaataggtgtatatatatttttgtttttgttttaaaatttttttataatttttagattagttttatttttaaagtttttttgtgtttagttaataagtgagagattttttgtttgtttgatttttagtaaaaattgttaaggaggtaggtgtaaggattttattgttttgtgttgtttttattcgacgttttttttatattttttattttttcgtatttggatttatttaattatataatagttttggggttatagttgtttattaaagataaggtagaagttattgtagtaatattgggagagaggagaaattggtttgtggtttttaggagttttagtgtgtttttttttaaggagatgtagtttttatttgagggttatatttgaggtaatatggcgagaaaggtaggtgagagttaagaattttttgaagatagtgtttatgtttaataggtggttttgagttttttttatataatgaggttaagtagagaggagttataatatgatttatatgtaagagggtgtttttttttttttatttttttgttttttaaaattttgtatttttaatggatttataggaagaaaaagaaaaggttagatgtttatgtttttttttgaaggaaagagtaaaataataatattttatagtattagaataaagtagtaagtttaaggattaggttttagttttgtaggtttatttggaagttatgtaaaattaaagtgataaaatgtattggtttgttttggattttttttggtttagtatcgagagtttacggtgaatagagttggttggttgtttataatttttaaagtagagttagaaaatttttttgaggttaataatttataaatggaattttttttaattttttttggaaaagtaagttggttaaatggatttattaaagaatggtgaaggtgtgaggtttagattagataagggaggagttttttttttttttttttttttttttaaattatatttaatatagatttttgtattgtttaattttttattagttatgtatatttttataattaggaaaaattataatatttataaataaagtatttaatgaattttaaatgagatataataaaatattgggtgtttatgaagatatagttttttaattgttttgtttgataaaagtttggatttgtatatattattagtatttttatgttttttttaattttattttttaattttttttattcgtgttgaaattaagttatttgttttttattgagaagtaagattttttttggattatttggaaaaaataagttaaataatggtttattgtttttttggatattaatattttatttattgtttttattttaaattttttttatatgataagtaaattttaatttgtattatgaaatagtaaagatagagttgtttaggatttatgttgttttaagtaaattaaaaataaaatattgttgatatgtattggttaattgttgtaagagataaagaacgaaaagggtgaattagagtttggataatttgatgttaagttttagttttgagcgtagattttttagattagtgattagttgtggttagttttggaagtgtcgataggttttttattggttttgtttttttaggtaatgtgttttttgtatttttgtttttatttgtttttttatttaagttttaatttttttgagtaggttgtttatatttattttttttggtttttaaaggtttttttaagagatttttttaaatttaatttttttttagatagtaatgagttttaattgttgataataattaaaatttatttttgtagttatggtttgagtgtgtgaacgttgtattttgagtttttattataatttagtagatgttgtttacggatattgagattatatatataagtatgtatttatatatttttaattagtaaaatttttgttttttaatattattaatttgaaagttagaattagaagggaatttagaggttatttgttttaacgtatgtgttttatttatttatttttgaagggtaaagtgtttttgtttaatgttatagaagggaattagtagtagaaatagtattataaattcgattttttagtttttaggataacgttttttttattatattgaaaagggaatatttttttttaatttatttaagatgtattttagacggtaaagaaatttaagttggtaatggagtagaattttaataggtcgtcgttagatcggagttttgggtgagtatgtaaattcgttattttgtattggcggcggagagatagcgtttttatacgtttattttttttttattttttttgttttaaaattgttttttaattaatttaatgtgaattatttttgttagtaaaatttttaatgtgttattaattgttttaaacgtcggttgtagtttattttttatgtttttaggagatttgttgcgggttttttgattttagttatattgttttttaagtagttagtgttatcgtgtgggtaaagaaaagtttatatttttgattattagaaaaagttatgagaaaaagttttagaagttgttgaatttatgaattggttaagaagaaattatgtatttgttttttttttttttttttttttttttattttaatttttattttttttatttttttttttattattatttatttttgtagaaattttttataatttttatagattaggaaatagagttaaaagtttaaaaggttaaagtaatttgtataagattttatattttattaattttagttttttataaaggttaagagataatatagaattttatttttattgttttgttaattttgattagttttagaaaatgtgtaataaatgttttttttttattttttaaataagagaagatatgaggattatgtttttatgagaaaatttgaagagttgagagtaaaggtcggtgtataagattgttaaatattttttttaattaggagatatttgttttatttttaaattttataaaatagtaaggtattgttttgtttttttattttatttatttttataagattatagattgagtttaaatattgatataggaggaatatgatttaaattttttagagttaatatataggtttggggaataagtttttttaattttatagtaaatataatggtttgaatgtttaattgtaggatattaataaatgtttttataaaaagttaaattaggtaattgtttagtttgttttagtgagggtttttaaattttataatatttttttgaggataagaaagggttagtttttaagataaaggagttttagttttaatttaatttaattatgtttaaattataataattatgtggttttgttttatatataatgagaataattgttaaattttttataaattttaattaaaaattatatttatttttaatttatgaatagttagtgtttttggagagagatggaaaaggagtattattttttgattatttttgtaaaaaaatttgttatgagagagagagattattataggaattggtttatataattatggaggttaagaagttttataatttgttgtttttaagttggagaattaggaaaattcgtagtgtaatttagtttaagttcgaagttttgagatttaggagtacggatgtttgagggtaggagaagatggatattttagtttagagagagtaaattagttttttttttatttttttgttttatttgggttttaaatatattaggtgatgtttatttatattggtgagggtggattttttttatttagtttattgatttaaatgttaattttttttagaagtatgaatatagatatatttagaatcgttttagtagttatatgggtattttttcgtttagttaagttgatatataagattaattattataagttttaaatgggttgattaagttaagatggggttattagagtgggttttaatttaattttattggtatttttataagaaaaggagatttggatatatatatagagatattag

SEQ ID NO: 87 - DNA, 7849 bp, Artificial Sequence
  chemically treated genomic DNA (Homo sapiens)
tttttatttttttttatttttatattataatttttttatagggaaatatataattttttttttttttttgaaatcgagttttgttttgttatttaggttggagtgtagtggtatgatttcggtttattgtaatttttatcgggtttaagtgatatatcgggttgaagtgatatttttgtttttgttttttgagtagttggaattataggtatacggtattttgtttggttaatttttgtgtttttagtagagatagggttgtattatgttggttaggttggttttaaatttttggttttttaaagtgttaggattatagatgtaagttattatgtttagtttataatgtttatattatttggattatgtaaatattatttatagttgagtatattttaatgttataaaatttttttttttatgtattatttattttttatgtagttagttttttatatattttagttttatatttatagatttaatcgaatatagattgaaaatatttagaaaataataataaaaaataataaattaataataaataatataaataaaaaataataataattatttatatagtattttttttatattatttattgtaagtaatttagagataatttaaagtatataagatgatgtgtgtagattatatgtagatattatattattttatataaggaatttgaatatttatggatttggtgatttgtagaggttttggaattaattttttatgaatacggaggaataattttgtattttttatgtattttgttattagtaattgttttgttttgtttttgatttagtgtttaatatatattttgttaatttattattaaatttttttttataggagtaaattttattttagtatgtgtaagtatattaggtattaattttatttttttgaagatagtaatttttttgtttttgtttggattggtggttttttaagtttgttttgtttttgtcgtttgggttatttttttattttgttttattgtgggatttttcgtgtttaaggtttgttttttataggttatagattagttatattttaaatattaagatgataataatattagcgatgagagaaataaagtttcgaaggaataaagattttatttttttatttttaggatatttaattatattttgtgtttttaaagttttaattgtttttttatgttattttatttaaaataaaatttttttttaaatgtttatgaatgagtatttttagttttaatatattattttttaagaaggtagtaagggtaattgaagatgtgttaaatatatattatagttaaattatatagaaagtaaagtgttttttttttggttttagaattgtagttgcgtatataaaagtattagtaaaataggtggtttgtaatatgtttaagtggaataatttatgttttatgattttgaagattaataaggtgaaatttataaagtttagatatggatttaattttttgtaattagttatattaaatagaaatttagttaagatttttgtaatattaataagttgattttaatatttatatgaaaatgtagaggataaaaattggtaaagataattttgaataagaatagaagttaaattattagaaattaagatttattataaggttatagtaattaagatagtttggtatttgtgtatagatagataaatagattgatggaataaaatagggagttcggtaataaatttatatatataaggttatatgatttatgataaggtgattttatttaaaggtttttttaataaatattgttggtgtaattggatatttatatggaaaaaaatgtattttgattttttagatttttttttttgtatggaggtatataaaaaaaaaattttagtggatttaaaatttaaatgtgagagtaaaattataaaatttgaagaaaaatttatagaagaatatttttaagattttggagtaggtaaagaaaatgtaaaatagtataagttgaattatatttaatttaagaattatttattaaaagatattattaatagagattaaagttaagttatatgtaggaaaaagattatttaaaatatatgtatgaaaaggaaagaaattaataagaaaaagaaaaataatttaataaaaatagggagggtttttgattttaatatttatatgaaaatgtagaggataaaaattggttttgataattttgaataagaatagaaggcgaattattagaaattaagatttattataaggttatagtaattaagatagtttggtatttgtgtatagatagataaatagattgatggaataaaatagggagttcggtaataaatttatatatataaggttatatgatttatgataaggtgattttatagtatagtgaataaaggtttttttaataaatattgttggtgtaattggatatttatatggaaaaaaatgtattttgattttttagatttttttttttgtatggaggtatataaaaaaaaaattttagtggatttaaaatttaaatgtgagagtaaaattataaaatttgaagaaaaatttatagaagaatatttttaagattttggagtaggtaaagattttgtaaaatagtataagttgaattatatttaatttaagaattatttattaaaagatattattaatagagattaaagttaagttatatgtaggaaaaagattatttaaaatatatgtatgaaaaggaaagaaattaataagaaaaagataaataatttaataaaaataggtaaaatatttgaatagttattttataaaagaatattttaataattaataagatgtttaatattatttattattagggaaattaaaattataatgagatttttttgtaaatttgttagaatgattaaaatttaaaaaggttgttggttggtgaagatgtggagaaattggaatttttttgtattgtttatgggaatgtaaagtggtgtagttattgtggaaaacggtatggtagttatttaaaaaattaaatttataattattatatgattgtcgggcgtggtggttcgttattgtaattttagtattttgggaggtcgaggtagttggtttgtttgagtttaggagttcgagattagtttggttaatatggtaaaattttgtttttattaaaaatataaaaaattagttgggcgtggtggtgtataattgtaattttagttatacgggaggttgaggtgggaggatcgttggagaaaaaaaattatttgtaataaattttgttatagatatatgaaaaagtttttgaaatttaaatttaattggattttttgggttattatattatttttttttttttagaatttttaataatattgaagtatatgtttttatgtgttttaatggtagagatatgtttttacggtagagattattaattattgttttttattgaagttgtttgttatgtttgtggttatttttgttaaattattgattattttagtatttggtttttttttttattttttttagtatttatttttattattatttattatgattatgatatatatatagattataatttagtatttttgtttttgattttttttatttttttattttaaatattttttttattttaattttaaaggagagaagtataaagaagatgaagtttttttgtaatattaaatagggtggttagggaagttttagtgaggagataatatttgagttaatattttgaaggaaatgagggatttaattttgttgattggagaaatatagtttaggaagaggaaatagtaattgtaaaggttttgaggtagaagttttttaggtttattatagaaagttttttaagaatagggattaaattttatatttggtggtgtggataatattttatttgtaggagtaatttatgtaatatgacgatttatagaagaatatgataaattattgattaataaatgagtaagaggtattttggtgaaaggttattaagtatatttggaaattattttttgtttgtaagattttgtaattaaatggtaggatttagggtttttaataatatataaaataaaagtataaattaaataaggaattaatattatgtataatgagtaaagtgtattttgagaggtattatttgaagagaattttaaaagttgtatattaattttatatgtagaatatttttttgaggggtttagatgtttttatatattttaattggagggtttttaaatattttagatttagaatgtatattaatttcgtgtttttttttttatagattatatttgggtagtttttttatgtttttgatttttttgtttttaatttaataagaatattgaggaatagaggtaataaaggatagtgaagattagatatttttaagcgatttatttaatgaagttttattgggtatttgttaagtgagtgaaattttgagatgtatatattttagtgtcgaggatagagttttatatttagtagatatttagtaaatttttgttgaatgaatgaagtgaatgaaagaatgaataaatgaaaggaacggttttttttgaggtatttggatgtgacgttaaaagggttagaattatatttttaatttcgtttgataatttttagaatataatagacggtgcgaataaagagaaaaaaaataaagtagtgaattttagaattagagggtatcgacgcggtagttgattttgtttgtatacggttttcgtagttttttcgtttaaaattatttacgcggtcgcgatcggtagtgacgttacgagatttggagttcgcgggaaaatttgtttttgcgttgtggggaggacgcgcgttcgcgcgggatttttaagcgtaggttttcgggaattcgagttgttatgagtttttgggtggataagtatcggttttgttttttgggacggttggattattataaggagtaggcggtttagttgcggaatttggtgagtttgcgggggtcgggagcgtgggagaggggaggtttttcggttcggggtttcgcgtttttttgaggagtagtgtttttttcgttcgtattggaaggtgataagtgttatggagaaaaataatatagggaagggggaagaggtgtgggaggttggtttgtatttttaaataagaaaagttttattgagaagtggtatttgagtcgagatttgaaggaaattgaaaagttataaatatagaaattcgagtaaagagtggaataggtaagaggggatagtaagtgtaaaattttcgggtagggatgtgtacggtatgttttaagaattttaggaggtcggcgtagtcgatagtggtgaattagcgggaagggtaatcggagatgggtgtatgtgttgggatggagttggagtgtagatttagttagttttagaataagacgagaagtcgttggagtattttgagcggagatgatattatgtgatttattttttagttggtttaaaatttttcgatgttattgttatttataagtaaagtgttgtaaatatgtatttattttaaagatcgtttttaatttttaaataaattgtattaggacgtttttgagattagttttttttttttgtttttttttttgagacggagtttagttgttgtcgtttaggttggaatgtaatggcgcggtttcggtttattgtaattttcgttttacgggtttaagcgatttttttgttttagtttttcgagtagttgggattataggcgttcgttattacgtatagttaatttttgtattttttagtagagacggggttttattacgttggttaggttggtttcgaatttttgattttaggtgattcgtttgtttcggttttttaaagtgttgggattataggcgtgggttatcgtgcgtggttgagattagagttttgtgaaagatttttttttttttattttgatgtttttttgtttgttgtagttgataaaagtgtttaatggtagtattttgtgagaacgaattgaattttttagggagtagagagtaaagaaggatttttaggagaataaagtgtttgtggaagatatttatttattttttttaaggattttaaattaatatatgatgttgatggaaacgtttttgtttaatattttggttttttttttcgattttttttagatttatagatattatttaattaagtgcgttttaaaaataagaaataataagaaaagattgtatacgtaaaaattattagattagttgatagtgttgtgatattgaaggtttttttttggtttttttattgatattgtatgtatattaatttaaaataaattgattattgtagtatttattatttatagataaattatatttttcgttaatagttttgtttttagtttttttagtgatagaatatattttattttttgtgattatattttgttgtatagaatttggaatgtatattttggatatgaatttaatataatggttttatgtgttaaatttgtttttaagaaatgtttatttgtttatttttttatttgtagtttaattaaattatgaaatatttaaagtataatttttatttttgattagattgaagtttaaaaaataaggtagtaagtgtttgtgggatatttgttattttttaggtagtatattagattgaatagtttttttttttgggattttttagtgatagagatggatgagtttataaagtattaaaatttattgtaataagcgttttttttaagatacgtattttatttttttaataatggttatttatagaattttattttataagattttatgttttcgaggttaaggtttgttatttatttatttttatagtttttatagtattggtttttaaattagattgattattagaaatattcgaaaagtttttgtaaaatttattattagtagatattgttagtgttttatttagtttttttgtttttaagtgtatatagattgatttttgatttttaattttgtatatttgtattttgtttgagggtttttttttttgtgatatttatagtagatttgaaatgtttggaattaatgttttttttttttttttatttatttttttaagtaggttttaagaaagaatttattagagataattatacggtagtttttttattttttgggtgggttaatattttggtgggtgtttatgttggttttaagagtttttttagtaggattaaatatagatatttagagttatttaatttgataatatatttttattggttgtttttttttttttgttttgtatttttatttttttatgaagtttttttttattttataagtaattttttaaagaaattaaatgtattgaattgttattatagggattgtttttaatagttcgaagtaagaaaggtttgaattttagagttatagaattttaattttatggatgatagggtttgtttattagttagttttttattttaaaaagttttttaggagattttgatagttaggtttgggagttttcgttttttagtatttagttttgtattttgtatgtgttgttacgtatataagttatataaaattagtgttaggcgaatagtaaattttttagtatatatatatatatatatataaaagatatataatattttgtgtatttatttatgaaattttaagttttatatatatataaaaaattgggtgtatttatttatgaattgggagttttatgggtagatatataaaatatttgttatttaaaaagtagtttggttttatttagagtagtttagtttgattagggaaaaatgttttgttttttttttttagg

SEQ ID NO: 88 - DNA, 7849 bp, Artificial Sequence
  chemically treated genomic DNA (Homo sapiens)
tttgaaaaaaaagaataaggtatttttttttagttaaattgaattgttttaggtagaattaaattattttttaagtaataaatattttatgtgtttatttatgaaatttttagtttatgagtagatatatttaattttttatatatgtgtaaaatttggagttttatgggtagatatataaaatattgtgtattttttatatatatatatatatatatgttgaaaagtttattattcgtttgatattaattttgtataatttatatacgtgatagtatatgtaagatataaaattaaatgttagaaagcgggaatttttaaatttgattattagaattttttagaaaattttttaaaataaaggattgattaatgaatagattttattatttatgagattaggattttgtaattttgagatttaggttttttttatttcggattattagaaatagtttttgtgataataatttagtgtatttggtttttttgggaggttatttgtgagataaaggaaaattttataggagagtggggatgtaaaatagggaaaggaaggtagttagtaagagtgtgttgttaagttgaatggttttaggtatttgtgtttgattttgttagggaaatttttaaagttaatataaatatttattagagtgttaatttatttaaagggtggggaagttgtcgtatgattatttttgatgagtttttttttgaagtttgtttagaaaagtggatgggggaaaagaaagagtattaattttaggtattttaaatttattatgggtgttatagagagaaaagtttttaggtaaagtatagatgtataaagttagaagttagaagttagtttgtgtgtatttaaaagtaagaggattgggtagggtattaatagtatttgttgatgatgagttttgtaaaagtttttcgggtgtttttgatgattagtttggtttgggaattagtgttatgaaggttataaagatgagtgggtgatagattttagtttcgggagtataaaattttgtaaggtgaagttttgtaaataattattattgaaaaaatggaatacgtattttaagagaagcgtttattgtaatgaattttaatattttgtaaatttatttatttttgttattaaaaagttttaaggaaaagaattatttaatttaatatattgtttggaaaatggtaagtgttttatagatatttattgttttgttttttaaattttaatttaattaaaaataagggttatgttttaaatgttttatagtttgattaagttgtaaataaaagagtaaataggtgaatattttttaaaagtaaatttaatatataagattattatattaaatttatgtttaaaatatatattttaaattttgtataataaaatgtggttatagaaaataaaatgtattttattattaggaaaattgaagataaagttattgacggaaaatgtaatttgtttataaatgatggatattgtagtaattaatttattttaaattagtatatatgtagtattaataaagagattaaaaaaaaatttttaatgttataatattattaattagtttaatgatttttacgtgtataatttttttttattattttttatttttaagacgtatttaattaaatagtatttgtaaatttaagaaaggtcggaagggaaaattagggtattgggtaaaaacgtttttattagtattatatattaatttgaggtttttaaaaggagtggataaatgttttttatagatattttatttttttaaagatttttttttattttttattttttggaagatttagttcgtttttataaaatattgttattgggtatttttattaattataatagataaagaggtattaggatagaggggagaggattttttataaagttttaattttagttacgtacggtggtttacgtttgtaattttagtattttgggaggtcgaggtaggcggattatttgaggttaggagttcgagattagtttggttaacgtggtgaaatttcgtttttattaaaaaatataaaaattagttgtgcgtggtggcgggcgtttgtaattttagttattcgggaggttgaggtaggagaatcgtttgaattcgtgaggcggaggttgtagtgagtcgagatcgcgttattgtattttagtttgggcgataatagttaaatttcgttttaaaaaaaaaaataaaaaaaaaaaattaattttaggaacgttttaatataatttatttgagaattagaaacgatttttggagtaaatatatatttataatattttatttgtaaatgataatgatatcgagaaattttaagttagttagaaagtaaattatatggtgttattttcgtttaaaatgttttaacggtttttcgttttattttgagattgattgggtttgtattttaattttattttaatatatatatttattttcgattatttttttcgttggtttattattatcggttacgtcggttttttgaggtttttagaatatgtcgtgtatatttttgttcgggaattttgtatttgttgtttttttttatttgttttattttttgttcggatttttgtatttatgattttttaattttttttaagtttcggtttagatgttattttttagtggagttttttttgtttaaaaatataagttagttttttatatttttttttttttttttgtgttatttttttttatagtatttattattttttaatgcgggcgggagaagtattgttttttaggggggcgcgaaatttcgagtcggggggtttttttttttttacgttttcggttttcgtagatttattaggtttcgtagttgggtcgtttgttttttgtgatagtttagtcgttttaaggagtagggtcgatatttgtttatttagaggtttatggtagttcgagttttcgggggtttacgtttgaaaatttcgcgcgagcgcgcgttttttttataacgtagagataagttttttcgcgagttttaaatttcgtgacgttattatcggtcgcggtcgcgtaaatgattttggacggaaaggttacgggggtcgtgtgtagataaaattagttgtcgcgtcgatgttttttagttttgaagtttattgttttattttttttttttttgttcgtatcgtttattatattttagaaattattaagcggaattgaaaatgtggttttgatttttttggcgttatatttagatattttagagaagatcgttttttttatttatttatttttttatttattttatttatttaataaaaatttattaaatatttgttaggtgtggaattttgttttcggtattagaatatatatattttagggttttatttatttggtaggtatttagtaaagttttattggatgaatcgtttgaaaatgtttgatttttattattttttgttatttttattttttaatatttttattggattagaaataaaagaattaagagtatggaaaaattatttaaatgtggtttgtaggggagaagatacgaggttaatatgtattttaagtttagaatatttgaaagttttttaattaaaatgtgtagaagtatttgaattttttagaaaaatattttgtatatgaagttgatatgtaatttttgaagttttttttaaatagtgttttttaaaatgtattttatttattgtatataatattaattttttatttaatttatgtttttattttatgtattattaagaattttaagttttgttatttgattgtaaggttttataggtaggaaatgatttttaaatatatttaataattttttattaaggtgttttttatttatttattaattaataatttattatgtttttttatgaatcgttatattatatgaattatttttgtaggtaaggtattatttatattattaagtataagatttaatttttgtttttgagaaattttttataataagtttggaaggtttttgttttagggtttttgtaattattgttttttttttttggattatgtttttttagttagtagagttgggttttttattttttttaggatgttggtttaagtattatttttttattgaggtttttttgattattttatttaatattgtaaaaaagttttattttttttatgttttttttttttggaattgaaatggaggaagtgtttgaaatgagaaggtaaaggaaattagaagtagggatattgaattgtggtttatgtgtatattataattataatgaatgataatggaaataagtattgagaggaataaagagaagaattaagtgttagaatgattaataatttggtaagagtgattataggtatgatagataattttaataaggagtagtggttgatggtttttatcgtgaagatatgtttttattattgaagtatatgaagatatgtgttttaatattgttgggggttttgaggaaggagaaatagtgtggtgatttaggaagtttagttaaatttgaattttagaagtttttttatatgtttatggtaaaatttattataaatgattttttttttttagcgatttttttattttagtttttcgtgtagttagggttatagttgtgtattattacgtttagttaattttttgtatttttagtagagatagggttttattatgttgattaggttggtttcgaatttttgagtttaggtaagttagttgtttcggttttttaaagtgttgggattatagtagcgagttattacgttcggtaattatatagtaattgtaagtttaattttttgagtaattgttatatcgttttttatagtggttgtattattttatatttttatgagtaatgtaaaaagattttaatttttttatatttttattaattaataatttttttaaattttagttattttggtaggtttatagagaaattttattatgattttaatttttttaatgataaatgatgttgagtattttattaattattagaatatttttttgtaaagtgattatttaaatattttgtttatttttattagattgtttgttttttttttattaattttttttttttttatgtatgtattttaaataattttttttttatatgtggtttggttttaatttttgttaatggtgttttttgataaatagtttttaagttaaatatagtttagtttgtattgttttataaaatttttatttattttaaagttttgaagatgtttttttgtgagtttttttttaagttttatggttttgtttttatatttagattttaaatttattggaattttttttttgtatgtttttatataaaaaaaaaagtttaaaaggttaaggtatatttttttttatgtggatatttagttatattagtagtgtttattaaaaagatttttatttattgtattgtagggttattttgttataaattatgtgattttgtatgtgtggatttgttgtcgaattttttgttttgttttattaatttatttgtttatttatgtataggtattagattgttttgattattatagttttataataggttttggtttttggtagttcgttttttatttttatttaagattattaaaattagtttttgttttttgtatttttatataaatgttagaattaaaaattttttttatttttattagattgttttttttttttttattaattttttttttttttatgtatgtattttaaataattttttttttatatgtggtttggttttaatttttgttaatggtgttttttgataaatagtttttaagttaaatatagtttagtttgtattgttttatattttttttatttattttaaagttttgaagatgtttttttgtgagtttttttttaagttttatggttttgtttttatatttagattttaaatttattggaattttttttttgtatgtttttatataaaaaaaaaagtttaaaaggttaaggtatatttttttttatgtggatatttagttatattagtagtgtttattaaaaagatttttaagtagggttattttgttataaattatgtgattttgtatgtgtggatttgttgtcgaattttttgttttgttttattaatttatttgtttatttatgtataggtattagattgttttgattattatagttttataataggttttggtttttggtagtttgatttttatttttatttaggattatttttgttagtttttgttttttgtatttttatataaatgttagaattagtttgttaatgttgtagaaattttggttgagtttttgtttggtatggttagttatagggagttaagtttatgtttgaattttgtggattttattttgttgatttttaaaattataaaatataaattgttttatttgagtatattataaattatttattttattgatgtttttatatacgtaattataattttaaaattaaaaaaaaaatattttattttttgtatgatttaattgtgatatatatttaatatatttttaattatttttgttatttttttaaaaggtaatatgttaaaattgaaaatatttatttataggtatttaaaaggaaattttattttaagtgaaatggtatgaaaaaataattaaaattttaaaaatataaaatgtgattaaatattttaggggtaaaaagatagggtttttattttttcggggttttgttttttttatcgttgatgttattattattttgatgtttgaaatatgattaatttatggtttgtgagagataaattttgaatacgggagattttatagtggagtaaagtgagaggatgatttaggcgataaagatagaataagtttggaaaattattagtttaggtagaagtaggaggattattgtttttaagaagataaaattaatatttgatatgtttgtatatattgagatgagatttatttttatagaaaagagtttagtaataaattagtaaggtgtgtgttaaatattaagttaaagataaaataagataattattaatagtagagtatataaaaggtatagagttgttttttcgtgtttatgaggaattgattttagaatttttatagattattaaatttatggatgtttaaattttttatataaaatgatgtagtatttgtatatagtttatatatattattttgtatattttaaattatttttaaattatttataataagtaatgtaaagaaaatgttatgtaaatagttgttattgttttttatttgtattatttattgttggtttgttattttttgttgttgttttttgaatatttttaatttatgttcggttgaatttgtggatgtggaattgggatatatggagggttaattatataaggaatagataatatatgagaaaggaaattttatagtattaaaatatgtttaattgtgaataatatttatataatttaaataatgtaaatattatgggttgggtatggtggtttatatttgtaattttagtattttgggaggttaggaatttgagattagtttgattaatatggtgtaattttgtttttattaaaaatataaaaattagttaggtaaggtgtcgtatgtttgtaattttagttatttaggaggtagaggtaggagtattattttaattcggtgtattatttgaattcggtggaggttgtagtgagtcgagattatgttattgtattttagtttgggtgatagagtaagattcggttttaaaaaaaaaaaaaaaattgtgtatttttttatgaagaaattataatataaaaatagggggaaatgagag

SEQ ID NO: 89 - DNA, 5610 bp, Artificial Sequence
  chemically treated genomic DNA (Homo sapiens)
tatattatagatttatttataagaagatagatggaattattttttttttttgaattttagaattttaaggaagttaatttgagtggtttagtttggattaagtgtttattttggtttaaataattgtagtagtatatttgtgtatttgtgtattttgtttttttataattttgtagttcggggaaagtgtgtagatggatgggtttttgaaaagtaagagttgtttagataacgttagaggtgtttagttttgggagataagagttgggttaggttgataattagtttaagagagtcggaattagatgaataagaattagattttgggtgataatttagattaagagttttgaggtttagttattttaaaaagtttaagttttattgttttttggttttttggttaagattatgtgtagtatttgtttttattagtttaatatttgatatattttttatttgaggataatataataaatagatttttggagtaaggagatggaataggagtttgttttgtttattttatatattggtttggattgtagtatttttaggaatggtgtattttttttattatttttaaaaagtttaagttttaagaggtagtttggaaaaaagtgtttttggatttatttatatttttttttttaagatggagtttcgttttgttatttaggttggagtgtagtggcgttattttggtttattgtaatttttgtttttaggatttaagtagtttttttgttttagttttttaagtagttgggattataggtgtgtgttaattatgtttagttaatttttttatttttagtagagatagggttttattatgttggttaggtaggttttaaagttttgattttaggtgatttgtttgttttggtttttcgaagtgttaagattataggcgtgagttattgcgttcggtttaatttttgtaattttagtagagacgagtttttattatgttgattaggttggtttcgaatttttgattttaggtgatttattttcgttttcggttttttaaagtgttggtattataggtatgagttatcgtttttggtcgggtttgtttatattttggagatgttgtatattatgtttttttttttaagagttacgtaagtatttatatatggaagattttgagaaggtatttgggaaaaaatttgtttaattgtaaatataataatgtatgtatttgtatgtggagttttttttttagtggattatttataaatcgtttattgtttttaatgtatattttggagatagatttatattattagtttttatttgttagttatttttataagggttgggatggtttatgagtgaatagttttgatttaaagtagtgttttttaaattttatttatttgtttatagtttttttggagtttgttttatatgttcgttttgtgtattatttttatatgtttttatgtaaattaattatttttttaaaaagttttattttagttatatttttaaaataatggttatttttttttatatatatcgaaatatatatttattagaattaaaatgtttgtttatgtattattaataatttttttaagtattatatggtggggatatgtgtttgaagtgttaggagttaggagtggtttttgtaagatagagtaagttagttaatttttgagtattgttagttatatatgttggtagagaagtttagtttgtgataagattgttcggatatttttatgtttgtgtacggggatgttttcggtttgttattgtgaagtttgtgttgtttttatgtttatttagttttttttggaggggtttggaaagtaaatgtaggttgggtatagtggtttatgtttgtaattttagtattttgggaggtaaaggtgggtagattacgaggttaggagtttgagattagtttgattaatatagtgaaattttgtttttattaaaattgtaaaaattagttgggtgtggtggtacgtggttgtaattttagttattcgggaggttgaggtaggataattgtttgaatttaggaggcggaggttgtagtaagtttagatggtattattgtattttagtttgggtgatagagattttattttaaaaaaaaaaaaaaaaagaaaaaaaagtaaatgtagattttttttgggaaacggggggttgggagagtggagtagtgtggatgtattgttatttttgaaggtcgtttttaaattattttggatttattgtagtaagtagatgttttattttttggttagggattgattttgagatgggaagagtatgagaagagatattaatagtaaggtaaaattggttttggtagtttgttttagagaaagagtatagttttggagttaggtcgatttgagtatgaatttaagatttagtatttattaggtgtttgtttttaaattattattttttgatagttattatatatttataatgattattatggagtggatgaggaaatagggatttagagaagttaaataatttgtttgatattatataggtaataaatagtagagtagaatttaaatttaagttgatttgatttttaaatgtgtgtttttaattaaagtagggtaatttgttttgatttgtttattttttgagtattttttttgtaggagggtttgttgttgggtgttgggaatttagtggtaggtaagatggataagattttttttttttatagattttgtttgttataggggaaatagataggaaattaattattatatttgtaatttaataataagtgttataagtgttataaaggagatagatattataaggtattttttatttttatttgtttatttattttttgagatttattcgttttgttgtttaggttggggtatagtggtgcggtttcggtttattgtaatttttgttttttaggtttaagcgatttttttgttttagtttttcgagtagttgggattataggtgtgaattattatattttgttaatttttgtatttttagtagagatagggttttattatgttggttaggttgttgttgaatttttgattttaagtgattgatttatattgattttttaaagtgttgtgattataggcgttagttatcgcgtttggtttataaggtatttttggttagttagtggaagtagggttagtagtgcgtcggagagttattttgaaaaagtgatatttaggttgattttgaagtatttataagatgtggtaaatatatttaatggtaaatatgtgatggtaaatattagatgtgataaagatattgatggtttattggatgaatagtttttatatttatttttaaatgattttatagatattattttatagataatatttaggatgaaggtaaataaaaaggagattaattaaaatatgaaataataatagtgaaagtggtaatagatgtggtaatatttataaaggagtaatggttagattagtatattgagaagattattttggtaattgttggaatgtagtttacgagagggttaagaatggaagtagtaatttttgttagaagtgtagtgttttggagtgcggtgttttttgttggtttgttttttgttttttttaaattaggttttattttgttgtttaggttggagtgtagtgtagtttcgatttttttttcgggtttaggtgatttttttattttagtttttcgagtagtcgggattataggtatatgttattatatttcgttagtttttgtatttttttgtagagttagggttttgttatgttgtttaggttggttttgaatttttgggtttaagtgatttgttagtttcggttttttaaagtgttaagattataagtgtgagatattatttttagttagtatattgtattaatttaagtaggagaacgtagattttaaaggtttatgggtagtagagagaagtagatgaagtaaagagatgtaattagcgggattagtgggaaatgagggaaaggaaggtgttaggatggggttttttttagttgagtggagtttagtttatttttagagaagtttgagaggtatttaattatagatgtaaggtagttggttgttggttttttgtttttaggatagtttgatttttgtaatataggcgattttatagagttattgtgagaatttagagttgggtatagaatagatgttttataaacggtagttttattttttatttgtttcgtttttttagtatgttagggatataggggcggatagagataggtttagttttttttggttttttgtattttttttttttttagtataatttttgggtttatagcggatgtttaataagtatttgtagaatgaattaaagaaattagatttttggtgatttagggttatatgtattcggcggaaaattggggttaaatcggatttttggttggttgaaaaattaaaataatttttaaaaagtgggcgtgaaataatttagaagttggagggtttggataaaggttggggaggggattttttttattaggcggttttagggtcggtttagtaagaaaggaggcgttggggagatttttggggttttagttgttaaggtattcgtcgttttaaggagatgcggacgtcggatattagttttgtttaagattgttgggtttcgtcgcggtttttaaaggtttattacgtggttgcgcggttagttttggttcggaggcggtgttcgggtggcgtttgcgtattgtttagtagaggggttggggtttcgagaaaaagcgtttggagaggaaggggaggttgtttggggtgggacgtcgtgggaggagtcggttttttatgtaaattatagcggagcgcgtacggttcggaggcggggtttgcgatgtaaagataggttcgtttggcgaatagcgagggggcgggtcgtaattttttgttttttttcgcgagcgttgacgtcgtcgacgtgttgtttaaaagcggtcgcgtaggcgtagtgagtttaaatgcgaatttaggttgttatataattgttggggtttgttttcgtcgttcgttcggtagttaggtagcgtcgtcgtcgtggtagtagttttagtcgtttttggagtttcgggtttatagttatcgtcgtttatttgcgttttttcgagttttcggagttttcgttcgttcgtataggtcggttcgtcgtttgcgttttttttacgtcgtttcgtttgtcgtcgcgttcgttttttcgggtcgatatgagtggggattatttttataacgatttttaggtacggttcggtttgattttggcggtttcggatttcggtttggtcgtttcgcgattttcggcgtaggtttcgattttagtttcggttcggtagttttgataggtcggagttttcggtgaggggtcgtttgtcggagtagatcggttcgttaggtcgcgagcgagggtcgcgaagttatagttcgaggtagggatggttgttttttgtggttattttcgggttttcgtttttttcgggggcgtagggtgagttagatttcggtcgcgcgcgttcgtcgtcggaggggttaaagtggttgttgtttgatattttttttttttttttttttaga

SEQ ID NO: 90 - DNA, 5610 bp, Artificial Sequence
  chemically treated genomic DNA (Homo sapiens)
tttggaaaaagaaaaggagagaatattaaataatagttattttaattttttcggcggcgagcgcgcgcggtcggggtttggtttattttgcgttttcggggaggacggggattcgggggtggttatagagggtagttatttttgtttcgaattgtaatttcgcggttttcgttcgcggtttagcgagtcgatttatttcggtaggcggttttttatcgggggtttcggtttgttaaagttgtcgggtcggggttggggtcggggtttgcgtcgggggtcgcgggacggttaggtcggggttcggggtcgttagggttaggtcgggtcgtatttgggaatcgttgtggaggtggtttttatttatgtcggttcggagggacgagcgcggcggtaggcgaggcggcgtgggggagacgtagacggcgaatcggtttgtgcgggcggacggggatttcggaggttcgaggaggcgtaggtaagcggcggtgattgtgggttcgagattttagaaacggttgaggttgttattacggcggcgacgttgtttgattgtcgggcgggcggcgagaatagattttagtagttgtgtaatagtttaagttcgtatttgggtttattgcgtttgcgcggtcgtttttaaataatacgtcggcgacgttagcgttcgcggaaagaggtagagggttgcggttcgttttttcgttgttcgttagacggatttgtttttgtatcgtaagtttcgttttcggatcgtgcgcgtttcgttgtgatttgtataaggagtcgattttttttacggcgttttattttaagtagttttttttttttttttagacgttttttttcggaattttagtttttttgttaggtagtgcgtaggcgttattcgggtatcgttttcggattagggttggtcgcgtagttacgtggtgggtttttaaaggtcgcggcgggatttagtaattttgggtagagttggtattcggcgttcgtatttttttggagcggcgagtattttggtagttgggattttagaggtttttttagcgtttttttttttgttaagtcgattttgaggtcgtttggtgggaggagttttttttttagtttttgtttaggttttttaatttttggattattttacgtttattttttaaaaattattttaattttttaattaattaagggttcggtttaattttagtttttcgtcgagtatatgtagttttgggttattaagggtttgatttttttggtttattttataaatatttattgagtattcgttatgagtttaggaattgtgttgagggaagggggaatgtaagagattaaagggaattgaatttgtttttattcgtttttgtatttttggtatgttgggaggacggggtaaatggggaatagaattatcgtttatagagtatttattttgtgtttagttttgaatttttataatagttttgtgaggtcgtttgtattataaaagttaaattgttttaaagataagggattaatagttagttattttgtatttatagttggatattttttaagtttttttgggaatgaattgaattttatttagttagaaaaagttttattttgatattttttttttttttattttttattagtttcgttgattgtatttttttgttttatttatttttttttgttgtttataagtttttgaagtttgcgtttttttgtttggattaatataatgtgttggttgggggtggtgttttatatttgtaattttagtattttgggaggtcgaggttggtagattatttgaatttaggagtttaagattagtttgggtaatatggtagaattttgattttataaaaaaatataaaaattggcggggtgtggtggtatgtgtttgtagtttcggttattcgggaggttgaggtgggaggattatttgagttcgaggaggaggtcgaggttgtattgtattttagtttgggtaatagagtgagatttggtttaaaaaaaataaaaaataaattaataaaaaatatcgtattttaaaatattatatttttaatagggattgttgtttttatttttggttttttcgtaaattgtattttaataattgttaaagtgatttttttaatatgttaatttaattattatttttttgtggatattgttatatttattattatttttattattattattttatattttaattgattttttttttatttatttttattttaagtgttatttgtgaaataatatttatgaaattatttggaagtaaatatgaaaattgtttatttagtggattattagtatttttattatatttaatgtttattattatatgtttattattagatgtgtttattatattttgtgaatgttttaagattaatttaaatattatttttttaaagtgatttttcggcgtattattgattttgtttttattggttgattaagggtgttttataggttaggcgcggtggttaacgtttgtaattatagtattttgggaggttaatgtggattaattatttgaggttaggagtttaataatagtttggttaatatggtgaaattttgtttttattaaaaatataaaaattagtagagtgtggtggtttatatttgtaattttagttattcgggaggttgaggtaggagaatcgtttgaatttgggaggtagaggttgtagtgagtcgagatcgtattattgtattttagtttgggtaatagagcgagtgagttttaaaaaataaataaataaataaaaataaaaggtgttttatagtatttattttttttgtaatatttatgatatttgttattaagttataaatgtagtaattggttttttgtttattttttttatagtaagtaaggtttgtgagaggggggaattttgtttattttgtttattattgaatttttagtatttagtaataggtttttttatagaagaggtgtttaagaaatgggtaaattaaagtaggttattttgttttggttaggagtatatatttggaagttaaattaatttaggtttgaattttgttttgttgtttgttatttgtgtgatattaggtaagttgtttaatttttttgagtttttgtttttttatttattttatggtgattattgtgggtatgtaatgattattaaaaaataatggtttgagggtaggtatttagtaagtgttgagttttggatttatatttaggtcggtttgattttaaagttatattttttttttgaagtaagttgttagagttagttttgttttgttgttggtgtttttttttatattttttttattttaggattaatttttggttagaagatgaggtatttgtttgttgtagtgagtttaagataatttgaggacggtttttaggaataataatgtatttatattattttatttttttaatttttcgttttttagggagaatttgtatttgtttttttttttttttttttttttttttgagatggagtttttgttatttaggttggagtgtagtggtgttatttgggtttattgtaattttcgttttttgggtttaagtaattattttgttttagtttttcgggtagttgggattatagttacgtattattatatttagttaatttttgtaattttagtagagataaggttttattatgttggttaggttggttttaaatttttgatttcgtgatttgtttatttttgttttttaaagtgttgggattataggtatgagttattgtatttagtttgtatttgttttttaggtttttttaaagaagattaggtaggtatgaaaatagtatagattttataatggtagatcgaggatattttcgtgtatagatatggaaatattcgggtagttttgttataggttgaatttttttgttagtatgtgtggttggtagtgtttagaggttgattgatttattttgttttatagagattatttttgatttttaatattttaaatatatgtttttattatatggtatttgaggagattattgatagtgtatggataagtattttaattttaatagatatgtatttcgatgtgtatgagaaaaaataattattgttttaaggatataattgggatgaggttttttaaaaaagtgattgatttatataaaaatatataggaatagtgtatagagcggatatataagataaattttaggaaggttataggtaaataaatgaggtttgggaaatattgttttaaattaagattgtttatttatggattattttaatttttataaaaataattagtaggtgaaaattggtagtgtaggtttgtttttaaagtatgtattgggaatagtggacggtttatagataatttattaaaagaagagttttatatataaatatatatattattatatttatagttaaataggtttttttttaggtgtttttttagggttttttatatgtaaatatttacgtgatttttgaaaagagggatatggtgtgtagtatttttaaaatgtaggtaaattcggttaggagcggtggtttatgtttgtagtgttagtattttgggaggtcgagggcgggggtggattatttgaggttaggagttcgagattagtttggttaatatggtgaaaattcgtttttattaaaattataaaaattaggtcgggcgtagtggtttacgtttgtaattttagtatttcgggaggttaaggtaggtagattatttgaggttaggattttgagatttgtttggttaatatggtgaaattttgtttttattaaaaatagaaaaattagttgagtatggttggtatatatttgtaattttagttatttgggagattgaggtaggagaattgtttgaattttggaggtagaggttatagtgagttaagatggcgttattgtattttagtttgggtgatagagcgagattttattttggaaaaaaaaatgtaggtaaatttaaaaatatttttttttagattattttttgagatttgggttttttgggggtggtagagagggtgtattatttttggaggtattgtaatttaggttaatgtgtagagtggatagagtaagtttttattttatttttttgttttaaaaatttatttattatattatttttagatagaggatgtattagatattaaattggtaagaatagatattgtatatgattttagttagaaggttaagaagtaatgagatttgagttttttgaaatgattgaattttaagatttttgatttaggttgttatttaagatttagtttttatttatttgatttcgatttttttaggttagttattaatttggtttaatttttgttttttagaattgaatatttttagcgttgtttaaataatttttgttttttagggatttatttatttgtatatttttttcggattgtaagattatggaggaataagatatataaatatatagatgtgttgttatagttgtttggattaggatgggtatttgatttaagttgagttatttaggttaatttttttaaggttttagaatttagaagaaaagagtggttttatttgtttttttgtggatagatttgtagtatg

SEQ ID NO: 91 - DNA, 6069 bp, Artificial Sequence
  chemically treated genomic DNA (Homo sapiens)
  unsure (4665): n is a or g or c or t
atatatgatagattgtgtattttgttggtgaagggtaggtgtatgataatatttaatgttttttaaagtagaatttttttaaaataagatgtatttttgaaagtttatttaattattagatatttttataaaggttaagagtaatttttttaagatatatgttaattttattttttacgttgtatgaaaattttgaattattattgagaattttgaattattgagaattttgaatattattgagttatattatataagtgaaagtgttttttttgtttgtataattagaatgttattagaagattagtgtagtttatttgattaaaattaatttaaataaatttttgtaaaataaaaaattaaaataaatattgtattttgtaattattgtaggtagaaattgaagaattttatttgttgtttgtttttttagtggtaataatatttaggaatatgattattgatatttttagttattcgtaaatatttgttatttttggtgtttaaatattattttaaaagtaaaaatatatttataaattgtagtaattaaatagttagaagaagtagagttaataatgtattataatatttattagagaaatattgaaaattaaaaagttatattgatagtaattttttttttttgagtttatttttaaagaattataataaattaaattatatttaaatatataatagttattaattaggtaattatttattgagtttattataggttagatattaaaaattttttttagtttagtaattttgtatatcgtaaggatttataaaattaatgtaatgagaagggagaggtgaaattatagatattgaattttgaatttaaatgttagtttttttaaatgttttcgaggttaaagatttgtttttttttttttaattgaattttagtgttggaatgatatataatatttaaatggaaattattgaaattttggtagatatttagaagtatggttttgagttgttatttttttggataatttatttattgattaaattatttattgtgtataaagtgtgatgataggtgtggtttattaggtaaattgtttattttttatgtatatatatatttttgagatggagttttgttttgttgttcgggttggagtgtagtggtgtagttttggtgtattgtaattttcgtttttcgggtttaagcgatttttttgttttagtttttcgagtagttgggattataggtatatgtttagttaatttttgtatttttagtagagatgcggttttgttattttggtaaggttagttttgaatttttgattttaggtgatttgtttgttttggttttttaaagcgaggtaaattgtttattaaatagtaaatgaataaatataaaattgttttttaattaaatgattagtttgaaattataatttaagggtgaatttaaggtagaaaatgcgtttttattatttttttaaatttttaggttttgagtatttaatatagtaggtatttaattttttttttattgttataataaggaaatataagatttaaaaatagaaattttgaagtagttaggataagtttttatggaagttatttagaaattttgattaaataaagatttttatatagtttatagaaatgattaatttttagtttttttttttggttagtgtttgttgtggggtagaaattaagttattatatgtaatatatatatataaagtagtatttaaaattagataaatttgatatagaagtttttttttttttttttttgagatggagtttcgttttgtcgttaaggttagagtgtagtggtgcgatttcggtttattgtaatttttgttttttaggtttaagtgatttttttatgtttgtttttttagtagttggaattataggtataggttattacgtttggttaatttttgtatttttagtagagaaggggttttatgatgttcgttaggttggttttgaatttttgattttaggtgatttatttttaattgaaaattattttatattattttagaagagaaagttatgtttaagttgcgtataattaattttattataaagatatgttaagtttgttgtatagttaaaaaggataattttttagaagttgagatatttttaatttagatttcgttttttatttattataaatttttgttttaaaaatgttgatttttatgtatatttagtaatttttatttgtaatttttttgggtaagttagtatttttttaaaattagtaatatttattaaaaggtttttttatattgagaagataaaaggatttaatgttttatatatgaggtaagtgaaaagaatattatttttattaatttatttgagttttgaatatattgttttatttattttaaaatttgaatttaggttgggtgcggtggtttatgtttgtaattttagtattttgggaggttaagatgggcggtttatttgaggttaggagttcgagattagggtggttaatatggtgaaaatttcgtttttagtaaaagtaaaaaaaattagttaggtatggtggtcggtgtttgtaattttagttatttgggaggttgaggtaggagaattgtttgaatttgggaggtggagggtgtagtgagtcgagattatgttattgtattttagtttgggtgatagagtaagattttgtttttaaaaataataataaaaacggaagataaagagttttgataatttaagtttaaaaaaggagatagttatgtattttatagtttagtttttatttagtatatttttataaaaaaaatttattgtttttaaaattatttttttttaaataaaatatatgtgtatttggagatgtaaatttatagtaagaatataagattattttaataagtattaaattgaggtttagggaagttaaataataaggttatggatatttggttaggtttagaaaagtttgtattttaagtttaaggtaaagaaaggttttattgttttgaagtttttagtatggtaaagttatatggttattagagagttaattaaaaaaattatgtttaaattatttttatgttttagagttttttatttttagatttagaatgtagtttaaagatgtgatttgagatatttttgtttttttttgagaggaaatgtatagttggaagtttataaaaatatttttttaaaaaatagtaatattgtttttatttttataaaaagtttttattataattttttggtggtattttatgtttttaagtatttattttggtgatcgttggtttttttttagtttgttttataagttaggttataaatggtttgaaattaggggttttgtttttattttgaatttatcgtagagtttggtatagcgtggtagagtgtgcgtttaataaatatttgagtggaattatattgaaaaataggaagaagtaaagttattttttatttgttaaagattgtgatgttgttgtattggtaatttttatttttagaaagttttaatgtgaatgaaattattttttattgtgtatttgaaaattttattgaaaatagttttaaaaattaagtatgtttttttagaggtagggggtatagttttggatagatgagaaaagtgatagtgatatttttgtattgtttagagaagaaaggttaataaagagtagaaatagaatatttaatttattttgtattttttttttagaatattttttgtgtgttttttattatttaagttttttatatgtagtttttttgaaattgattatatgtttttttggggtgaggggaggagacggaagaaggagatggagaaggtttgagatgatttttttcgatagtagcgtttatttaggtttttggggaggtcgggttacggggtttttttgtattagtggtttataacgttttgtttgcggtttataatcgtttttttaaaataatttttttttgggacggttttcggtttttttttgttatttttatttttatttcgtttttatttttatttttagaggttttaggtaaacgtttcggattttcggttaggttttagagtaaatagtacgtttggaggattataatcgattcgaggttaattcgattttttttttttgtcgtttttaattgatttttgaagtagtttttgttttttttttaaatggaaaatttatagatatatatataaataaaaattttaagtttttttttcggttttattcgtaatgacgttttttttttcgggtttcgtttttttagggggtttggaattttgggattggtcgagaggttgtggcgataaggttcggattggatagtatggcgttgattgatagcgggggcggtcgtcgcgtttttttttttttttcggtgtgtaaatgtgtgtgtgcggtgttatgtcggataagagggaggtgatcgtggcggcggcggcggcggttttgtttattgtttttttcggtgtgtgtgtgtgaggaaatcggggttgtagcgaggttaaggttgtttttgaagtagcggcggcgatcgggacgattattttggcgattcgagtggttggttttcgcggagtgtgagaaggataaggtatttttgcgttttcgttacgttcgagcgtttcgggttttatcgcggttttcgcggttcgtnatcgcgttttagttcggtttgtagcggcgtcgggcgggcgagaaggtaacgtcgtcgttgcgtcgtcgtcggtcgttttttgttttttttttagtcgtcgcgttaggttcgggcggcggacgtcgcgtttcgagtttgagggtagtcggcgcgcggtttttttagcgggttcggttggacgttcgtttcggattttcgcgatggggcgcgggggtcggcgcggttaggagttcggcgagtggagcggtgggtgcgaatcggcggggtttagcggttcgtagggaggcgggagcggcggttgcggttttagggtttgtgagttggaggtattcgttatggttaagtcgggtggttgcggcgcgggagtcggcgtgggcggcggtaacggggtattgatttgggtggtaagtggttggttttcgggacgggcggttgtattgtttcgggttcgcggcgggggcggaatttcgaacgggcgggggaggggaaagggagggaaatttcgtttttcgaacgggcgttttataggggtttgtgtttgtagaattttttagttcgtttttcgcgttttttttttttttttttttttgtacgtttttggaagttttgattgttagagcgtaatgtgtatttgaaattttggggggataaaatcgcgaacgtaatatatagttttcgtttttttttttttttttttaattagattttttcggggtagtcgaatttgaaatggtggggatggcgataatgtaagtgtgtttgtgtggggtagtattttttttaaatgtagtttaagaaaattttgggaaaaggggtgtgtgtgtgtgtgtattttaaatgtagttttttttggggttttaattttaaagaagaatgtattgggatttttatagtaatttgtattttaatttggaaagttttatttaatgcgtttaattgagagcgtattggggatgatttttatagtagttaatattgtaggtcgtttttttgttagggtgagattattaaaagaagtgtttgtttacgttagtatcgtaggtgtaacggggtgagggttgaatggatgttttggagaggtgattgaagtgtttagttttgaagttaaaggatttcgacgtttagtttttgttgggaagtagaagtaattgtagcggaaggaggaagggagattggatttttacgatagatcgataattcgtcggtattttatttgtttagcgtagagtttagattagggttattttttatatagaaaatttaggtatttcggagaaaagtaaaaagtgttatatttttttggatttttgacggtttgttttttcgtttttgttttaaatattttaagggagtttttatataggtatttttgttatttagttcgttttttttttgtttgggtga

SEQ ID NO: 92 - DNA, 6069 bp, Artificial Sequence
  chemically treated genomic DNA (Homo sapiens)
  unsure (1405): n is a or g or c or t
ttatttaaataaagagaaaacgaattaagtaataaaaatgtttatatgaaagtttttttgaggtatttaaaatagggacgggggaatagatcgttaaaagtttagaaaaatgtaatattttttattttttttcgaaatatttaggttttttgtataggaaatgattttggtttgaattttacgttgagtaagtgaaatgtcggcgaattatcgatttgtcgtgggaatttagttttttttttttttttcgttgtagttatttttattttttagtaagaattgagcgtcgaaattttttaattttaggattaagtattttagttatttttttaggatatttatttagtttttatttcgttatatttgcgatgttgacgtagataagtattttttttaataattttattttgatagagggacgatttatagtattaattgttgtgaaagttatttttaatgcgtttttaattgagcgtattgaatgaggttttttaaattgaagtgtaagttgttgtagaaattttaatgtatttttttttgagattaaagttttagaaagagttgtatttagaatatatatatatatatatttttttttttagggtttttttgaattatatttggagaaaatgttgttttatatagatatatttgtattatcgttatttttattattttaggttcggttgtttcggaagagtttggttaaaaagaaaagagaggaagcgggggttgtatgttacgttcgcggttttgtttttttaaagttttaagtatatattacgttttggtagttaggatttttagagacgtatagagaaagaaagaaagaaaaggcgcggggagcgggttggaggattttgtaagtataggtttttatggagcgttcgttcgggggacgggattttttttttttttttttttttcgttcgttcggaatttcgttttcgtcgcgggttcggaataatgtagtcgttcgtttcggggattagttatttattatttaggttagtgtttcgttgtcgtcgtttacgtcggttttcgcgtcgtagttattcgatttggttatggcgagtgtttttagtttataggttttgaggtcgtagtcgtcgttttcgtttttttgcgggtcgttgggtttcgtcggttcgtatttatcgttttattcgtcggatttttagtcgcgtcgattttcgcgttttatcgcgaagattcggagcggacgtttagtcgagttcgttgaggaggtcgcgcgtcggttgtttttaaattcgaggcgcggcgttcgtcgttcgggtttagcgcggcggttgaggagaaagtagggagcgatcggcggcggcgtagcggcggcgttgttttttcgttcgttcggcgtcgttgtaggtcgggttgaagcgcgatngcgagtcgcgagggtcgcggtggagttcgaggcgttcggacgtggcgaggacgtagaggtgttttgttttttttatatttcgcgaaggttagttattcgagtcgttagagtagtcgtttcggtcgtcgtcgttgttttaaaggtagttttagtttcgttgtagtttcgatttttttatatatatatatcgagagggataataaatagagtcgtcgtcgtcgtcgttacggttattttttttttgttcggtataatatcgtatatatatatttgtatatcggggagagagggagggcgcggcggtcgttttcgttgttagttagcgttatgttgtttaattcgggttttgtcgttatagtttttcggttaattttaaaattttaagttttttggaggggcgggattcgaggggggaaacgttattgcgggtagaatcgaaaggaagatttggggtttttgtttgtgtgtgtgtttgtgggttttttatttgaagggagagtaggggttgttttaagggttaattgagggcggtaaagggaaagggtcgaattggtttcgggtcgattgtaattttttaagcgtgttgtttattttgagatttaatcgggaattcgaagcgtttgtttggggtttttaaggatgaggatgggggcggggtggggatgggggtggtaggaagaagtcgggggtcgttttaaagggaaattattttaaaagagcggttgtaaatcgtaggtaagacgttgtagattattggtgtaaggaggtttcgtgattcggtttttttaagggtttaagtggacgttgttgtcgaaaaaaattattttagattttttttatttttttttttcgttttttttttttattttaaaagagtatatggttagttttaagaaaattatatatgaaaagtttaaatgataagggatatatagagaatgttttagggaaagaatgtagggtgggttgagtgttttatttttattttttgttgattttttttttttgaataatgtagagatgttattgttattttttttatttgtttagaattgtgttttttgtttttaagagggtatgtttaatttttaaaattgtttttagtggaatttttaaatgtatagtaaggaataattttatttatattaaagttttttaagaatgaaaattattaatatagtaatattatagtttttggtagatggaagatggttttatttttttttgttttttagtgtaattttatttaagtatttattgggcgtatattttgttacgttgtgttaggttttgcgatgggtttaaagtaaaaataaggtttttgattttaaattatttataatttggtttgtgagatagattaaaagggagttaacgattattaaaatgagtatttgaaggtatgaagtgttattaaagagttgtgatgaaagttttttataaagatgaaaatagtattattgttttttgaagaggtgtttttgtgaatttttaattgtgtatttttttttaagggaaaataaaaatgttttaggttatatttttaaattgtattttgagtttagaggtggagaattttgaaatatggaaataatttaaatatagtttttttaattagttttttgatggttatgtaattttgttatattagggattttagaatagtgaagtttttttttattttgaatttggggtgtaaatttttttgaatttgattaagtatttatagttttgttatttaatttttttgagttttagtttagtgtttgttaaaatgattttgtgtttttattgtgagtttgtatttttaagtatatatgtattttgtttgaaaaggggtaattttaaaggtaatgagttttttttatgaagatgtattaggtagaagttaagttataaaatatatagttgtttttttttttaaatttaagttgttaaagttttttatttttcgtttttgttgttgtttttagagatagagttttgttttgttatttaggttggagtatagtggtatgatttcggtttattgtattttttattttttaggtttaagtaatttttttgttttagttttttaggtagttgggattataggtatcggttattatgtttggttaattttttttatttttattagagacggggtttttattatgttggttattttggtttcgaatttttgattttaagtgagtcgtttattttggttttttaaaatgttgggattataggtatgagttatcgtatttagtttaggtttagattttgaaatgaataaaataatatatttaaaatttaaatagattaataaaaataatgttttttttatttgttttatatgtgaggtattgagtttttttgtttttttagtatgaaaaagttttttaataagtgttattagttttaagaaaatattgatttatttagaagaattgtaaataagaattgttgaatatatatgaaaattaatatttttaaagtagagatttgtgatgagtggaagacggaatttagattaaaagtattttagtttttaaagaattgttttttttaattgtgtagtagatttagtatatttttatgataaaattgattgtacgtaatttgagtatagtttttttttttggggtaatgtgaagtaatttttaattaggggtggattatttgaggttaggagtttaagattagtttgacgaatattatgaaattttttttttattaaaaatataaaaattagttaggcgtggtgatttgtgtttataattttagttattggggaggtagatataggagaattatttgaatttgggaggtagaggttgtagtgagtcgagatcgtattattgtattttagttttagcgatagagcgagattttattttaaaaaaaaaaaaaaaaaagtttttatattaggtttgtttagttttagatattattttgtatgtatatattatatataatgatttaatttttattttatagtaagtattgattaaaaggaaaaattagaaattagttatttttataaattgtataaaggtttttatttaattaagatttttgagtagtttttataggagtttattttaattattttagaatttttatttttagattttatatttttttattgtagtaatgaaaaaaaaattaaatgtttattgtgttaggtatttaggatttgggaatttaaaaaggtgatgaagacgtattttttgttttaagtttatttttgaattatagttttaagttaattatttaattgaaaagtaattttatatttatttatttgttgtttaataaataatttatttcgttttgggagattaaggtaggtagattatttgaggttaggagtttaagattagttttgttaagatggtaaaatcgtatttttattaaaaatataaaaattagttgggtatgtgtttgtaattttagttattcgggaggttgaggtaggagaatcgtttgaattcggaaggcggaggttgtagtgtattaagattgtattattgtattttaattcgggtaatagagtaagattttattttaaaaatatatatatatataaaaaataaataatttatttgatgagttatatttattattatattttatatatagtaggtaatttaattagtaagtaaattatttaagaaaatagtaatttaaaattatatttttaggtatttgttaaagttttaatagtttttatttaaatgttgtgtattattttaatattgagatttagttgggaggaggaggataaatttttaatttcgggagtatttaaagaagttaatatttgaatttaaaatttaatgtttataattttatttttttttttttattgtattaattttgtggatttttacgatatataaggttgttggattaagaaaaatttttaatgtttggtttatggtagatttagtaagtgattgtttagttaatgattattgtatgtttaaatgtaatttagtttgttatagttttttagaagtgagtttaaggaagaaaagttattattaatgtgattttttggtttttagtatttttttagtaaatattatagtatattattaattttgttttttttaattatttaattgttatagtttataagtatatttttatttttaaaatgatatttaagtattaaaagtaataagtgtttgcggatggttgaagatattaatgattatatttttgagtattattattattaggaagatagatagtaggtaaagttttttaatttttatttgtaataattatagggtatagtatttgttttgattttttgttttgtaggagtttgtttagattggttttggttaaataagttatattgattttttggtgatattttaattatatagatagaagggatatttttatttatatgatatagtttaataatatttagggtttttagtaatttagggtttttaataataatttagggtttttatataacgtggagaataaaattagtatgtgttttaagaaagttgtttttggtttttgtaaaaatgtttaataattggatggatttttaaagatgtattttgttttgagaaaattttgttttgggggatattagatgttattatgtatttgttttttattaataagatatataatttattatgtgt

SEQ ID NO: 93 - DNA, 11015 bp, Artificial Sequence
  chemically treated genomic DNA (Homo sapiens)
gtgggtcgattatttgagattagtttggttaatatggtgaaattttgtttttattaaagatataaaaattagtttggtatgatggcgtacgtttataattttagttattggagaggttgaggtacgagaataatttgagtttaggaagtagaggttgtagtgggttgagattatattattgtattttagtttgggtaatagagtaagattttgtttttaataataataataataaaaaatatataaaataaaaaaattcgtaaatgataggatattagtttggttgtttagttattttttatttttatagatggttgatttaattataagtatttttaggtagagtgaaaaaaattaagggttagtaagattggtgttcggaggtgagagttttgaaagagagtttattatgtgagtagtgggtttgagtgaggaggtatatttttgggtcgtggtgtttagagtgtagagtttttgtagcgtaatattttcgaggataggaaggttataattatcgaagatattttttttgttcgtgatttttaaagttgggttttaggtaggttttagtttgtttgtttgtgtcggtgtcggttttattttttgagtgttttttagggttaagtattgtattgtgttgtgtttttttggatatgtattaaacgtggattttttcgatggtttttaggtgggtttcgggagttttttagaggtgtttaatatgattgggtgattgaatgagatggttggttcgaatttagatagcgagtggtggtatattaggatttgatttagattatttattgttttcgttaattgttatagtttataatagttttattttattatatttttaggtggcgtttattgtttattttttttaggaattttttgggtgagttgtagtttattttattttcgtttggtttcgtaggggattttttagggtgtagggttttttatatttgttcgttgtattttatgtttgtgtaggatgttggaggtagatgtttttagtatttaatatttgtacgtgttttgaaggttgaaagagtatttatagggatagtagtttaattttttttttcggagttatttgttttttttgatgggttttttgtttttatagagagatgttttttgtagtcgggttggtaatggcgatagataaattttatgttttattttatattaatcgaattagaatttcgagggtttgtgatttaggaatttatgattttaaaaatttttcggttaggtacggtggtttatatttgtaattttagtattttgggaggttgaggtgggtagattatttaaggttaggagttttagattagtttggttaatatggtgaaattttgtttttattaaaaatagaaaagttagtcgggtgtggtggtaggcgtttgtaattttagttatttaggatagtgaggtaagagaattgtttgaattcgggaggcggagattgtagtgagttaagatcgcgttattgtattttagtttggggtataagagcgagatttcgttgtaaaaaaataaaaataaaaataaaaattttttttaataatgttgatatagttcggggatagatggggattggtaattatttaggaattgtaatttttttatatgatagataaggaaatagaaattagagagggggatgatttgttaaaagtaatatagtggtaggaattgggttttgtttagaagttaggttttttgattttggttttattatattaatatattttatttttatttggttaaggtttttttttattatttggaattagttatttttgtaagttaataagtttttatttttgaaaatttataatgtgtaaaggggaggaggtttaatgttttacgggtttagcgtagtagttatagttggggataaagatagttagtgtagttacgagttttttgattatggttttatttttttttaggattataagtgtttttttattgagtagggagtagatggttgggtgggtaaaggggtattggcggatgaattttaaggcgttttggttagttttttttttatgtttatcggaagataggttagtaggataagtagaggggattttgtttgagttggtggacgttatattgtttacgtagttggtggtgtttgagtagttgtttaggttggttttattgatgtttcggttagttagtaggtggttcgggtttagtttataagcgggaaattttttataattgttgtttcgggaagaagggttggtattttttattgaaaagtttatacggaatttttggtttttttgtttgtggcgttgtggggggttgtttattattttattttcgttagagtgtgtgtgggttggagtggagggtagtattaattgattatcgtttttttttttaatatagtaggaggagtttatttgtgatggggtgttttttatgttgtttttttttgttttatttagttttggaggattgatgtttgtttggaagcggatggtttttttattgttatttggatatgatttttttttattaatggtatttgggtagttggttttaaagttattagggatgagggttttagaggggtaggtattgaggattttaatattgttttcgttgatggttttgtggttgattgttttgtttcggattatttgggggtttaatggtattgtgaggtttgtttggttgttagatttagaaagtacggaggtggattttttcgtgtttaaaattttaatatttttattattgttgatatttttttttatatttatatttaggtagtttaagtttttttgggggtcgaaattgtttaatttagttatttttatttttttgtattttttattttttagtttttgttttattttgattaatatagattttatattggatttgtaagaattaatattaattaatattttaggaattgggtatttttttagagaattggaaggcggtttgttttgattgggtttagagggtatgtttttttgtttttttattattttgttatcgatttttataaagtttttaaagagaaagtttgttatatgttgttgttttagaagtgttttattaatttgattggttaggaggtaatataggttttttttgaatatgtgtttaatgtggttgagttgagttagggtttgggtgaaatatttagtgttatagagtttttttaaggtttttaattttttgttaaaatatttggtggattttgttttgataagttttggggtgtaggttggtttgtaggtgtaaaggtttgtgtcggtagatttattagggttagaggtagtggatgtttggttggtttgattttggatgtgttttattttattaggatataaattatgtttttttaattttcgatgagggtatgagcggatttgttttagtaggttttgatgtttaatgatggatttttttatattggttagtttattggtttttttaattgtttgagatgagtaaaagtttttgtcgttggtttttttttggattttcgtttttgtgtgtagtattgttttggtgtaatttaagttttttagtttttttttaagttttttagtaaatgtttttttgttgttagtttttaagtatttagaagttttggaaaattcggttgaaagtttttggaattgttgtatgattttatgttggtttgtagagatataagttatgtaaaacggttttacgaagttacgggtttttaggtcgtatagggtaaggtggtgtacgtatgtaaaggcgttttttttagaattttttagtattattttggagttttttacgaagtttagtttggggtaggtagatttaggaggatggtttacgaaggaagtttggtaatttatagatatgatacgtagggagaagtaattgagattaaaagtgttaaaaattttggtgttattggggatggttagtaagggttggggttttatttgtttagagaattcggaaataagaatgaagtttttcgaaaatttggtttcggatagttttgattaggggttagtattttgattggcgaaggggaagagcggtatcgagtattttttaggtagggtcggtttattgtaaggtttttttttatattttttttttttggtgaaggttattacgttaggggcgttgattatatttttagatatatgaagaaaatattgagaggaagtgggaaagaatgcggtgttaatcgacgcgtagaaggtaggttttcggagaaggaagtgaagtttttacggttttttttgcgatttttcgaattcggggttttaggttgttttttatatattcgaggagaagaattttagtagtttttttatagttgtagttttttcggagttttttgaggttttatgaacgttaaggtcgtaggtttaattgtttttttttttttcgttcggcgagcgcggttagtataagaaatttgttgcgaaattatttgtatttttcggaatttattgcgatagtaaaagttttcgttttgaataaggtttaacgcgaggttacgggacgtcgtaggggttagttaagcgttgttgttttttattgttcgagggtagaaatcgtcgcggtttttaggacgttataattcggattttgttatcgcggcgtcgttattttgatattatatgatttttggtgttcgcgtcgcgtgattcggaagcgttttcgtagattttcgagtaggagattaaaaagttatgagaaagaggttttggatgggagtgtttggcggtttttcgtaagaaggagttcgattaattaattattgtcgggaaggaggggaaagaggggcggagtgagacgggggcggcgggaaggtggtagaggggaacgtgtttggacgaggggcgcgggatagtttgggagttgtagttttaggtcgttgtggggcgcgcgtttggcggaagtagttggagaaggcgggcggaagttttacgttaagatattggattcggtgttgaggcggcggttgcggtacgggaaaggtttagtgattgaagttttaaaggttagtaggttggtggggacgtgatcgaagcgaggttttggttttttttcggtgggcgttatttgagttttatttttggtttttttaggatgcgtcggtagtcggggagcggtttcgggcgcgaggtttgaggatgattttttttgtcgttcgttacgcgtttcggtggttgcgacggttcgaagatcgtgttttttttcgcgtcgttatggagatggtttttcgaggcgtgcggaaagttttttgtgtggtcgaaaaaaacgacgcggttaaggggatcgtcgatttgttgttaaacggtcgtatgaggcgggtaagaaagcgcgtttcgattagttgcgtgttttaagggaggtttatcgagcgggatagcgtggtgggcgttaagaatcgagatgaaggcgattattttttattttttaggttttattgtttttcgtttggattattgtagtggttttttgtttgttttcggattggagtgtattttaaaacgtagttgatatattttatttatttgcgtggaaattttttgttttgtttgcgtttagtaggtttttaaatttgtttgattttcggaatcgtttcgggcgttggttgtttttcgggttttgtgtgaggttggggaagtgtgtattttattgtttttttttagagatttagaaatttatttgggaattattgattagatttttttaatttggtatttaagttttgttcgatcgttttttagttaatttagttttttttattttgtgttatagttattgtattttatagtttttgtgattttttagttttatagtgtatatttatagtaatacggtaaggtttggggattagatttgaagttagttttgtttttattcgaatgaattgattttgagagaggtaagtggtaagaatgtgttttatatatacgggaggtataaacgtaagggaggataagaaaaagttttataaaggaggtgttacgggagatataaagagttgtttaggaaaatattttagataataaaagtagattttgaaatggttttttggagaatttttttaagagtatgggtggaagttttttgtttatttttttttagtttttagggttttaagatttgtttttagattaaggatagtgggagtggagttagggttgtgtgaatgttggttgatagttttatttgtttttagtgttagaagttttggtgattagttttaaggtttgtttatttttagataatgaagtagatattgaaaaatggtttttttacgtttaattttttattttttaaggttttgttgaatttatttttttttttttttttttttttttttttttttaagtaatttagaggttttgtatttatttatttttattttattatattatgaatttatagggaataggttttagcggtttaggtttttttttattggtttttataaagtgtattttttttaatggaataggttggtattttaggtgaattttttttttttgatttgttttttttttgattatttttttttatatattttaggaaagattttggtttttagagtgtttaatatgtttaatagaaatattaattttttgggtaagaatttagtttttgttcgtagtagtgttaatagtatgttgggtaatatagatttttttagttttgttatgtaatatttgtgggttatttttttttgaatagtatgtatttttacgaagtttttaatattatttttattgtagattttggtgtttgtggttagagaaattttatatttttgttttgttttgtttgtttgttttgagatggagttttgtttttgttgtttagtttggagtgtaatggtgtgattttagtttattgtaattttcgtttttcgggtttaagcgatttttttgttttagtttttttagtagttgggattataggtgtttgttattatgtttagttaattttttgtatttttagtagttttattgtgttggttaggatggttttgaatttttgattttaggtgagttattcgttttagttttttaaagtgttagggttataggcgtgagttatcgtgtttagttcgaattttatgttttttataaggttaggagaatatatattagatgtttcgttttttttttttttgtgttcgttattttggtaaattattttaagatggtagttttagttaaaaggaaagattttttttggaaagagaatttttatttttatgtatagaaaatataatagtgtgtatttaatttagtttagtggtaaattttttagtttttgttttttttaggttggtaatgtaagttatagattttggatttagggtattgtttttttagtgatagtagattttatatgtcgttgtaatttgttttattagtttagttagagtttttttgtttattagaaagttaatttttgtgaaggtgatagtggtgtaggtttttttgtggaatttgatattatagttttgacggtgtagtagagaatttttattttaggatatagtataggtaggaagataattagtttaatgggatttattattagttgattttttatgttttttattaagttggtgacggtgttaatttttgttcgaagtgtaggtggttttttagtagcgatattttttttgttggaagttttttttttagtttgggttaacggtttcgattttattttttgttttgttttttgtttgtattgtgggttagtttaagtaattgagtagtttaagtttggtagtttgaggtttgggtgaattggttaattttaggtggtatattagttatttatagagtatagcggttttgtcgtagtagttatttatagcgggattatttgataaagtgggtgaggtttttaggttagatatttaatgttaaaattattagggttttttttaaatgggatttattatttttttggtttattgttgttttatgataataggggttagggttattttttttttttggttatttttttttttggtatttggggcggttagaggagagaggttgttgaaatgttttatttttaaggaattttttttttattatttgtttttttatattaggttagagatttttattgatatgttgttatagtattttattttatttgaaaggtatttattagttatagttaaataatgggatgtgcgattatttatttgatttttgttattgtttttttttggattttaaattttaaaggatagtgattatattttgttaattgttatgttttaacgtttaatatggtgtttggaatgtaggaaatttttaataaatattaatatttgggttgagcgtagcggtttatgtttgtaattttagtagttggggaggtttaagcgggtagattatttgaggtcgtgagtttaagattagtttggttaatatggtaaaattttatttttattaaaaatataaaaattagttaggtgtggtggcggggttttgtaattttagttatttacgaggttgaggtaggagaatcgttttaattcgggaagtggagtttgtagtgagtttagattgcgttattatattatagtttgggcgatagagtgagattttattttaaaaaaaaattaggttaggtatggtggtttatatttgtaattttagtattttgggaggttgaggtgggcggattatgaggttaagagattgagattattttggttaatacggtgaaattttgtttttattaaaaatataaaaaattagtcgggtatgttggtagacgtttgtagttttagttattcgggaggttgaggtagtagaatggtatgaattcgggaggtggagtttgtagtgagtcgagattgtgttattgtattttagtttgggtaatagagtgagattttgttttaaaaaaaaaaaaaaaaatttatagttgttgaatgtatgtttgagttgagtttgaaagttttattaggtagtagaaattgtaaagaataatttagtggtttgaaattgtttggtatatttagaaatagtgagaagttaggggtgtggtgtggtgggaagagatatcgatgagttaagtaagagtagtagttgagtgtagattataagaattttagagagttatgtaggttgagtggtaaaatgtatagaaaattgattattttaattattttgaagtatatagtttagtggaattttgtttattaaatgtgttattattattattatttagttttagaaggtttttttttattttaagaggaagttttatatttattaagtagttattttttttattttttttttagttttttataattacgaatttgttttttttttttatggatttgtttgttttgggtattttttataagtggatttatattttatatgtttttttgtgttaggttttttttatttaatataattttgaagtttatttatgttgtattatgtattaatattagttttttattttttttttttggtttttgagaaggagttttttttattgtcgtttaggttggagtgtagtgatgagatttcggtttattgtaattatcgttttttaggtttaagcgatttttttgttttagttttttaagtagttgggattataggtatttattattacgtttagttaattttttgtatttttagtagagatagggttttattatgttggttaggttggttttaaatttttgatttcgtgattcgtttattttagttttttaaagtgttggaattataggtatgagttattgtatttggtttttttatttttttttatggttgaataatattttattatatggatagattatattttattttattatatattagttgatggatatttgggttgtttttattttttgattattgtgaatagaatttttatagatattcgttgggcgtggtggtttatatttgtaattttagtattttgggaggtcgaggtaggtggattacgaggttaggagattgagaatattttggttaatacggtgaaattttatttttattaaaaatataaaaaaattagtcgggcgtggtggtaggtgtttgtagttttagttattcgggaggttgaggtaggagaatggtgtgaattcgggaggtggagtttgtagtgagtcgagattacgttattggattttagtttgggcgatagagttagattttattttaaaaaaaaaaaaaaaaaagaatttttatagatttttatgtataagtttttgtttgaatgtgtttttttgtttgttttttgttttttgagatagtttcgttttgttatttaggttagagtgtagtggcgttatttttatttattgtaacgtttattttttgggtttaagtgatttttttgttttagtttttttaagtaattgggattataggtatatattattatatttggttaattgttgtatttttagtagagatggggttttattatgttggttaggttggtttcggatttttgatttaaagtgatttaattgttttagttttttaaagtgtatttgaatgcgtttttaatttttttgggtaaatttgtaggagtggaattgttgtgatatgtgataattttgtaattttttgaggaaatattaatattttttagagtggttaaagtattttatatttttattgataatgtttaatttttttatatttttaataatatttgttattttatttgttttttttattattttatttaattattattttaatgggtatggagtggtattttattatggttttgatttgtgtttttttaatgattaataatattgagtatttttttatatgtttgttggttattttttattttttttggagtaatgttggttatatttttggtattataattaagaaattattgttaaatttaggattagaaagaattatataaaggaatttattgttttaaacgtaatttatattttttatttatttttgttttataga

SEQ ID NO: 94 - DNA, 11015 bp, Artificial Sequence
  chemically treated genomic DNA (Homo sapiens)
tttataaaataaaaataagtaaaaaatataaattacgtttaaaataatggatttttttgtataattttttttgattttgaatttggtaatgattttttggttatgatattaaaaatataattaatattgttttaaagaagataagaaatggttaataagtatatgaaaagatgtttaatgttattaattattaggaaaatataaattaaaattatgatgaggtattattttatatttattaggataataattaaatagaataataaaaaaaataagtaaaataataagtgttgttgaggatgtggagaaattggatattgttagtggaaatgtaaaatgttttggttattttggaaaatgttggtgtttttttaaaaagttatagagttattatatgttatagtaattttatttttataaatttatttaaaagaattaaaaacgtatttaaatatattttgggaggttgagatagttggattattttaggttaggagttcgagattagtttggttaatatggtgaaattttatttttattaaaaatataataattggttaggtgtggtggtgtgtgtttgtaattttagttatttggggaggttgaggtaggagaattatttgagtttaggaggtggacgttgtagtgagtggagatggcgttattgtattttagtttgggtgatagagcgagattgttttaaaaaataaaaaataaataaaaaaatatatttaaataaaaatttgtatatgaaagtttatagaagtttttttttttttttttttttgagatggagtttggttttgtcgtttaggttggagtttagtggcgtgatttcggtttattgtaagttttatttttcgggtttatattatttttttgttttagtttttcgagtagttgggattataggtatttgttattacgttcggttaatttttttgtatttttagtagagatggggttttatcgtgttagttagaatgtttttaattttttgatttcgtgatttatttgtttcggttttttaaagtgttgggattataggtgtgagttattacgtttagcgaatgtttatagaagttttatttataatagttaaaagatgaaaataatttaaatgtttattaattgatgtatggtaaaatgaaatatgatttatttatatgatagaatattatttagttataaaaaggaatgaagaggttaggtgtaatggtttatgtttgtaattttagtattttgggaggttgaggtgggcggattacgaggttaggagtttgagattagtttggttaatatagtgaaattttgtttttattaaaaatataaaaaattagttgggcgtggtggtgggtgtttgtaattttagttatttgggaggttgaggtaggagaatcgtttgaatttgggaggcggtggttataatgagtcgagattttattattgtattttagtttgagcgatagtgagagagatttttttttaaaaattaaaaaaaaggaatgaagaattgatattaatatatggtataatatggatggattttaagattatgttaagtgaaagaaatttgatataaaagagtatgtaagatatgggtttatttataggaaatgtttagaataggtaaatttatggggaaagaaggtagattcgtggttgtgaggggttgaggagagggtaaggggagtgattgtttaatggatatgaggtttttttttggggtgaaaaaaaattttttggaattagataatgatgatggtggtatatttagtggataaaattttattgaattatatattttaaaatgattaaaatggttaattttttgtgtattttattatttaatttatatggttttttaagatttttatgatttgtatttaattgttgtttttgtttaatttatcggtgtttttttttattatattatatttttaattttttattgtttttgaatatgttaagtagttttaagttattaggttgttttttatagtttttattgtttggtaaaatttttaggtttagtttaaatatgtatttaataattatgaatttttttttttttttttgagatagagttttattttgttgtttaggttggagtgtagtggtataatttcggtttattgtaagttttatttttcgggtttatgttattttgttgttttagtttttcgagtagttgggattataggcgtttgttagtatgttcggttaattttttgtatttttagtagagatagggttttatcgtgttagttaggatggttttaattttttgattttatgattcgtttattttagttttttagagtgttgggattataggtatgagttattatgtttggtttaatttttttttgagatggagttttattttgtcgtttaggttgtaatgtaatggcgtaatttaggtttattgtaagttttatttttcgggttgaagcgatttttttgttttagtttcgtgagtagttgggattataggatttcgttattatatttggttaatttttgtatttttagtagagatggggttttgttatgttggttaggttggttttgaatttacgattttaggtggtttgttcgtttgagtttttttaattgttgggattataggtatgagtcgttgcgtttagtttaagtattaatatttattgaaagttttttgtattttagatattatattaggcgttaggatatagtaattaataaaatataattattgttttttggagtttagagtttaaggagaggtagtgataaaaattaaataaatgatcgtatattttattatttaattgtaattagtagatgttttttaagtagaatagagtgttatgatagtatgttagtaagggtttttgatttagtgtgggggaataggtggtgagggaaggattttttgaagatgagatattttagtagttttttttttttagtcgttttagatgttaaaaggaaagatggttaaggggaagaagtggttttggtttttgttgttatggagtagtagtaggttaaaaaggtggtaaattttatttgagaaaagttttaataattttggtattggatatttagtttaagggttttatttattttgttaaatagtttcgttataaatggttgttgcggtagagtcgttgtattttataagtggttgatgtgttatttgggattgattagtttatttaggttttagattattaaatttaagttatttaattgtttaagttggtttatagtatagataagagatagagtaagggatgagatcgaaatcgttggtttaggttgagaagaaagtttttagtaaaggggatgtcgttattaagagattatttatatttcgagtaggggttgatatcgttattaatttggtagagagtatgaagggttagttggtggtggattttattgagttggttgtttttttgtttgtgttgtgttttaagatggggattttttattgtatcgttaagattgtggtgttaaattttataggaagatttgtattattgttatttttataaaggttaattttttggtagataaaggagttttggttaagttggtgggataaattataacgatatatgagatttgttgttattggggaggtaatgttttgggtttaaaatttgtagtttgtattattaatttagaaaaggtaaaggttaaagaatttgttattaaattgggttaagtatatattgttgtgttttttgtatataaaaataaaaattttttttttaagaaaagtttttttttttggttggaattgttattttggagtaatttgttaaaatgacgaatataaaggaaaagaggacgaggtatttgatgtatgtttttttggttttatagaaaatatggagttcgagttgggtacggtggtttacgtttgtaattttaatattttgggaggttaaggcgggtggtttatttgaagttaggagtttaagattattttggttaatatagtgaaattattaaaaatataaaaaattagttgggtatggtgataggtatttgtaattttagttattagggaggttgaggtaggagaatcgtttgaattcgggaggcggaggttgtagtgagttgagattatattattgtattttaggttgggtaataagagtaaagttttattttaaaataaataaataaaataaaataaaaatatggagtttttttggttatagatattagaatttataatgaaggtgatattgaggatttcgtgagaatgtatattgtttaaaagggaatgatttataaatgttatatggtagaattggaaaagtttatgttatttagtatgttgttggtattgttgcgaataagggttagatttttgtttaaagaattaatgtttttattgagtatattaagtattttaagaattaagattttttttgaaatgtgtgaaggaaaatgattaaaaaagaagtaagttaaagagaaagggtttatttgaagtgttagtttgttttattgagggaagtatattttgtgagaattaatggaaaagagtttgagtcgttggaatttattttttatggatttatggtatgatagggtaaaaatagataaatataagatttttggattgtttaaaaaaaaaaaaaaaaaagggagagagagagaatgaatttagtagagttttgaaggataagaagttaggcgtaggagaattattttttaatgtttattttattgtttagaagtagataaattttggggttggttattaggatttttagtattggaaataggtaaagttgttagttagtatttatataattttggttttatttttattatttttgatttggaaataggttttaggattttgggaattaaagaaaaatgagtagggaatttttatttatgtttttagaaaagttttttagaaaattattttaggatttatttttgttatttgagatatttttttggatagttttttatgtttttcgtggtattttttttatgaaatttttttttatttttttttgcgtttgtgtttttcgtgtgtgtagaatatatttttattatttattttttttagaattagtttattcgggtaggaatagggttgattttaaatttaatttttaaattttatcgtgttgttgtaagtgtgtattgtgaggttggaaagttataagggttgtagaatgtagtggttgtggtataggatggggagggttaggttggttggggaacgatcgggtagggtttgaatgttaagttaagggaatttggttagtagtttttaaatgaatttttgaatttttagggaaaaatagtaaaatatatatttttttagttttatataagattcgaagggtagttagcgttcgaggcgatttcgagaattagataagtttgggaatttgttaagcgtaagtaaaataaaaggtttttacgtaaatgagtgagatgtattaattacgttttaaaatgtattttagttcgagagtagataggaggttattgtaataatttagacgaggggtagtgaggtttgagaaatgggagataatcgtttttatttcgatttttggcgtttattacgttgtttcgttcggtgggttttttttaaggtacgtagttgatcggaacgcgtttttttattcgttttatgcgatcgtttgatagtaggtcggcgatttttttggtcgcgtcgtttttttcggttatatagaggatttttcgtacgtttcggagggttatttttatggcggcgcgggaaaaggtacggttttcgggtcgtcgtagttatcggagcgcgtagcgggcgataggaaagattatttttagatttcgcgttcggagtcgtttttcggttgtcggcgtattttggggaagttagagatgaggtttaaatggcgtttatcgaaagggaattagagtttcgtttcggttacgtttttattagtttgttggtttttggagttttagttattgagtttttttcgtgtcgtagtcgtcgttttagtatcgaatttagtattttggcgtggaattttcgttcgttttttttagttattttcgttaggcgcgcgttttatagcgatttggaattataatttttagattgtttcgcgtttttcgtttaagtacgtttttttttgttattttttcgtcgttttcgttttatttcgttttttttttttttttttttcggtagtggttggttaatcggatttttttttgcggggagtcgttagatatttttatttaaggttttttttttatgattttttaattttttgttcggaagtttacgaggacgttttcgggttacgcggcgcggatattaggagttatgtgatgttaagatggcggcgtcgcggtagtaggattcgggttgtggcgttttaggagtcgcgacggtttttgttttcgggtagtgaggggtagtagcgtttggttgatttttgcggcgtttcgtagtttcgcgttaagttttgtttagagcgggggtttttgttgtcgtagtgggtttcggagagtgtaggtgatttcgtagtaggttttttgtgttggtcgcgttcgtcggacgaagaagagaagggtagttgggtttgcggttttggcgtttatgaggttttagagagtttcggaggagttataattgtgagggggttgttagagttttttttttcgggtgtgtgagaagtagtttaggatttcgggttcggggagtcgtaaagaaggtcgtaagggttttattttttttttcggaggtttgttttttgcgcgtcgattaatatcgtatttttttttatttttttttaatgttttttttatatatttggaaatatgattagcgtttttgacgtagtggtttttattaaagaggaagagtatgaagaagagttttataatgagtcggttttgtttgaggagtattcggtgtcgtttttttttttcgttagttagggtgttaatttttggttaaaattgttcggggttaagttttcgagggattttatttttattttcgagttttttgagtaggtgggattttaatttttattgattatttttaatgatattaaagtttttggtatttttgattttaattatttttttttgcgtattatgtttgtggattattaggtttttttcgtgggttatttttttggatttgtttattttaagttgaatttcgtggaggattttaaggtggtgttgggagattttaaggagggcgtttttgtatacgtgtattattttattttatacgatttggaggttcgtggtttcgtgaggtcgttttgtatggtttatatttttgtagattagtataaaattatgtagtagttttaggagtttttagtcgaattttttagagtttttgagtgtttgaagattggtaataggaaggtatttgttggggaatttgaaaaaaagttgaaagatttggattatattaggatagtgttatatatagaaacggagatttagaagaaagttaacgataaaggtttttatttattttaggtaattgagaaagttaatgaattggttagtgtggagaagtttattattgaatattaagatttgttgaagtagattcgtttatatttttatcggaagttgaaggggtatgatttgtgttttggtgagatggagtatatttaggattaggttagttaggtatttattatttttaattttgatgagtttgtcgatatagatttttatatttgtagattagtttatattttaaaatttattaaagtaaagtttattaagtgttttgataagaagttgaagattttggaggagttttgtgatattgaatattttatttagattttggtttagtttagttatattgaatatatgtttagaggagatttgtgttattttttgattagttagattgatagagtatttttaaaataatagtatataataaattttttttttgaagattttgtggaggtcgatgataggatggtggagaaataagaaagtatattttttaagtttagttaagataggtcgttttttagttttttagaagaatgtttaatttttaaagtgttaattagtgttggtttttataagtttagtgtggagtttgtgttgattaagatggagtaggaattgggagatgaggagtataaggaagtggaagtgattgagttgagtagtttcgatttttaggaaaatttggattatttggatatggatatgaaagggagtattagtagtggtgaaagtattgaagttttgggtacggagaaatttattttcgtgttttttaaatttgatagttaggtaagttttatagtattattgagtttttaggtggttcggagtaaagtagttagttataggattattagcgaggatagtattgaagtttttagtatttgtttttttgaggtttttatttttgatgattttaaggttagttatttaagtgttattaatgaagaagaattatatttagatggtaatgaaggagttattcgtttttaggtaagtattagttttttagaattgggtgagatagaggaaggtagtatagaaaatattttattataaatagattttttttgttgtattgggaaggagagcgatggttagttggtgttgttttttattttagtttatatatattttgacgaggatggggtggtgagtagttttttatagcgttataggtagaaggattaggggtttcgtgtagattttttagtggaaaatgttaattttttttttcgagataatagttgtgaagggtttttcgtttatgagttggattcgagttatttgttggttagtcgggatattagtaagattagtttggataattatttagatattattagttacgtgagtagtgtagcgtttattagtttagataggattttttttgtttattttgttggtttgtttttcgataggtataaaaagagggttggttagaacgttttaaaatttattcgttagtatttttttgtttatttagttatttattttttgtttagtgggaggatatttgtggttttgggggaagatgaggttatagttaggaaattcgtgattgtattggttatttttgtttttagttatggttgttacgttaagttcgtgaaatattgggtttttttttttttgtatattatggatttttagaagtggaagtttattggtttgtagaggtaattggttttaggtggtggggaagggttttggttagatagggatgaggtatattggtgtggtggagttagaattaggaagtttggtttttagatagggtttagtttttattattgtgttatttttggtaagttatttttttttttggtttttatttttttgtttgttatgtgagggggttgtagtttttaggtggttgttaatttttatttgttttcgagttgtgttagtattattagggaaagtttttatttttatttttatttttttgtaacgaagtttcgtttttgtattttaggttggagtgtaatggcgcgattttggtttattgtaattttcgtttttcgggtttaagtaatttttttgttttattgttttgagtagttgggattataggcgtttgttattatattcggttaatttttttatttttagtagagatagggttttattatgttggttaggttggtttggaatttttgattttaggtggtttgtttattttagttttttaaagtgttgggattataggtgtgagttatcgtgtttggtcggaaagtttttaaaattatggatttttgagttataagttttcgaggttttgattcggttggtgtgaggtaagatatggaatttatttgtcgttattgttagttcgattgtagggagtatttttttataaaagtaaaaggtttattagaagggatagatgatttcgggggaaagggttaggttgttgtttttgtaagtgtttttttaatttttagagtacgtgtagatgttgggtgttgggagtatttgtttttagtattttatataggtatgaggtgtagcgggtaggtgtggggagttttgtattttggagggttttttgcggggttaaacgggaatgggatgggttatagtttatttaaagaatttttgggggaggtgagtagtagacgttatttgagggtatgataagatgaaattgttgtgggttgtggtagttagcgggagtagtgggtggtttgggttaagttttggtgtgttattattcgttgtttggattcggattaattattttatttagttatttaattatgttgaatatttttgaagggttttcggggtttatttgagagttatcggaagggtttacgtttagtgtatgtttaaaaaaatatagtatagtgtagtgtttggttttgagaagtatttagagggtggaatcggtatcgatataggtaggtagattggggtttatttgaggtttagttttaaaaattacgagtaggagagatgttttcggtggttgtgatttttttattttcggaggtgttgcgttgtagaggttttgtattttgagtattacggtttagaagtgtgtttttttatttaggtttattgtttatatgatggatttttttttaggatttttattttcgaatattagttttgttggtttttgattttttttattttgtttggaaatgtttgtagttgggttagttatttgtggggataagagatggttaaataattaagttggtattttgttatttgcgggtttttttgttttgtgtgttttttgttgttgttgttgttggagatagagttttgttttgttgtttaggttggagtgtagtgatgtgattttagtttattgtagtttttgttttttaggtttaggttattttcgtgttttagtttttttagtagttgggattataggcgtgcgttattatgttaggttaatttttgtatttttagtagagatagggttttattatgttggttaggttggttttaaatgatcggtttat

SEQ ID NO: 95 - DNA, 6326 bp, Artificial Sequence
  chemically treated genomic DNA (Homo sapiens)
ggggttagagtaagtagattaagggggaaaagtggtttaggtcgaagtttgttggcgtatagggaggaaaggtgggtgcgtagtagagttttgggagatgtagttggagttgttatgggttagagagtttatttgtagatagtgtcgttattttataaggtttcggtttttttattgtgggatggttgtatatttaaggggaatatttatttatttattttgaggaaaaaagtaaattgttattttatttgggatagttttttggttaagattattgattttattgtagttttgtgattttttaagtggggaataaggttgatagtttaaggtcgattttggatttttttttttgtatagtatgatgagtagtagaagtttttttagtgagggagtttttttggtattttttttgaataatgttttttataatttttttttatttttttggttttattgtaaagttttttgttttagtttttgttttttagttatttgtgtttaggcgttaaatgtaaaaggtgtaaaagggaatgtggtgaggaggtatttttagttttgatttttaggttttaatatttattttaggtgattgtttggattgtttgttttgcgttttatttagatatatcgtttttttataattaagtgtatacgtgtgtatatatatgtgtgattatagatggtagtgttttttatatatcgttatatgtttagtttttttagtatgatttattttagtgatttgatttacgttagtatgtattaagtagatgtttttttttgtaatgttgttaggtgttttattgtagagaatgttatgttttttttttttttttttttttttggagatggagttttattttgtcgtttaggttggagtgtagtggcgtaatttcggtttattgtaagtttcgtttttcgggtttatattatttttcgtttttcgggtttatattatttttttgttttagtttttcgagtagttgggattataggcgtttgttattatgtttagttaatttttagtatttttagtagagacggggttttattacgttagttaggatggttttgattttttgatttcgtgatttgtttattttggttttttaaagtgttgggattataggcgtgagttatcgcgttcggttagagaatgttatgtttttatttaattatttttttgttgatagatattagtttgtttttaattttttattatgattgataatgttgtagagaattttttagtgatgtggtttattataggtattatcgtgtttagtttgaggttattttagcgttgttttgttttattttttggggatttagagtttatatggatagttttgttagggtttattattgatttttgtgagtttttttaggtgattttattttttatttgttttatagtttttgttttttttgggttagtatgttattatttaggtttttttgtaatttttgtttgagttttttattttttgggagttgtttttttgatttttattttttgtttttgtgttttattttttggattttatagagtatattttttgtggattttttttaatttttatttttttttttatttaatttagagttaggttttgtttttgtaattttttttttcgaattttgatttatttttttttttttttatttatttggatttttttatttaattaaatttagtgttttttttgttgtgggtttgttcgtagtattattatttgtttttttttagtggatagtcgtattatgtttttttttttattaagagaagtgtagttttgtggtagttttgtatcgtttggatgttgatcggttgttttttttgttttttatttttttaaggttattattgtagtagttttttttttttcggtacgtagttttttttttttttttcgttagagtagttttattagcggagaatatgttggtatagttattattttgaaataagaggggatagtgtattagtttttttttattttttaggttttgttgagtttattttatgtagtttttatttgttatttattatatggttttattaggattatttagggttttgtttgttagattttatagttaggttttagttgttatttcgtttggtttgttagtgttttttatatggtgataattgttttgaagtgtttttttttgtggtttttaggattttattttttttgatttattttgttagttttttatttttcgatttttagtttgggttttttttatattgttgttattttttttaggttatttaggttgtttaatgggtaggtttcgtttaatatatttgaagttttatattagattgttagtttttttttgttatgtttaagttaaagttatgggttgttttttttgtttttttgtaaagatgaggttttattgtgttaattaggttttttttaaatttttggttttaagtggtttttttgttttcgttttttaaagtattaggattataggtgtgagtttatggtaggtgtgagtttatgtttagttttgttttaggttatttttgatttattttttttttttttttttatgtttcgttattttaggtttgtttggattttgatttttttcgtattttttattattgttatttagggtttatttatttttttttatgtggtagttagagaggtttttttaatatttgaagttagattattttatatttatgtaaattttttgttgttttttagtatttttagagtagatttatattttatatttttgtttttttttttagttttatgagtttttttgtttagttatattttttttaaggattttattttttttgttttttttgtttggattttttttttaggtgttatttagttttgttttgttttttttttgtttttatattatagtatgagttttgggagggtaggatttggtgttgttttgtgttgtattttttgtattttggattaggttaagtatgtagtaggtatttaataaataattggattattaagtttattttaaggagtggaattgttgggatgtgtattcggattttgagagggatttttgaattgttgtatatagaggttgtttttatttaatttttttatgtttttatttgttgtgtgtgtaacgattttgagtttttttttatgtgataagtataagtttattgtagttttgagttttttttgcgagtgttgttggatatgatgtgatattataaaggtatttacgtggtggtttttttttttttttttttttttttttttgtttgagatggagtttcgttttgttgtataagttggagtgtaatagtatgatttcggtttattgtaatttttattttttgagttcgagcgatttttatgttttagttttttaagtagttgggattataggtatttattattatatttagttaatttttgtatttttattagagatggggttttgttatgttggttaggttggttttgaatttttgattttaagtggtttatttattttagttttttaaagtgttgggatataggcgtgagttattgtgtttatttaggtggtagtttttttttatgttgagattattttattttgtttttattttttttgagatagggttttgttgttatttaggttggagtgaagtggttgttttatttataggtgtagttatggtatataatagttttgaatttttggttttaagtaagcgatttttttgttttagttttttgagtggttgatattataggtatgtgttattatatttggtttgtgagatttattttaaaagtatatgttttttttaatattttttggttttattgtttttatttaaatttttgttagatttggaatcggttttagtgggatttaggaagtaggagtttaattttatttttttttatagtagattttttagttgttttaatacgagtttttttttttttttttaatacggtgttatgtttataaatattagtgttatatttataatgattgaaaaaataaaaagggtttatgtggtttttttttatttggttagtaggtattgaatgttatgtgttaggtatagaaagttgttgtaaagattaatagtgatttagatataaagtttatcgtgttttattttgggggtgaagtagtcgttgatgatggtatgatgtgagtgggttggaatggagatttagtttaagagttgtgggtataggagggttgatttattttgttagtggtgttgggagatttgagttgggtttgtgggttatttagttgtattttttaggtttggcggagtttttttttaggtagggaagcgtaggtatagaggttttaagtgcgtgtttgtttcgatgatgatatttgatttaatttggttagagtatgatttgtaaagtaaaaggtggagtggaataggtgggagatagatgtgatagagttttgatgtttgtttggggttggatcgattagttagagggttttaggtttattatggattagaaggatttggggggtttagtttgggtatttgtattttgtaaagtgttttggggcgtttaagtgttttgttgagcgggaggtgttgttttcggttacgatagtttttttttttaggtgagtttatttgtaggtggaagagttagtttagagaggagggttaggtatttatttggtttgatttattattttagatttttaggttttagtatttttttagtatggatttaggaataaaattgatttgagattattggggttattttatttttttttaaatggagttatatttttaggattattttagttattttagttgatttggtagtttttttttgtttttaattttagatgtttttaagtttttttaattttttaattttttttttttttgttttaggttggttttgttttttttttgttaaagtgattttttttgtagtggtgtaggttttattgatagtattgttattttgagtgtttttttttttttttaggagttagtattggtaatagtgttgtgttgcggaagagtggagtttaaatttttttattgttagtgtttcgaaattggagtgtgaaggatcgagataaaatgaagattgtgtttatggttgttgaaaagtcgtttttggtatagttaattgttaaaattttttttagaggtaggagagattagttttgttttggtttgtaagtacggtcgtttatgtgttataggatatttttttttaatgtgattttattttggttggggtagatttggttcgggtcggtaggtggtaatgaagtattttagtatgttatagtggggtgtatttgtttttatttttggtaatgtgttaaagttggggtttttataaggtataaggtataatttataatgaaattgaaggatagttattatttatatgttgggtttggtggggttattaggtataggtagtagaaattagttttggaaggaaggagacgtagttaggattatattttagttaaggtttgatgaggttatgttttaggtattgttatttttggatatttttattgttttgtggattttacgttattttagagtagttaatggattgagttatggttataggtattattgagatattagggagttcgagagggaatgtttgttatttatttttaattttggttattggggtggttggtagggtgttgtttttttttatttttgaattttttttaaataggaagagttttagatgttgggtatttagaaatgataggtatttatttggtttttttttggtttagtagttgagaggggaagagattttcgtttagttgagaaggtatggttcgtaggggacggtgttttaaaagtggtgttcggtgtttagaagttgagaaagtatagttgagtatggttagtggagagggtgagaattcgataattagaaggtttttggtaatcgagagtagatttggagtttgttttagtaaacgatgaataacgttttaatgaagtgaggtaaaaatggaattgaagagtgaaaatataaatatagagaaagagtttatttttgtttgtttttggttttcggtagtttggggttttgtatcgagagtgttttgtgttaggttgttggtagatgttgttttttttgagcgtcgttttattttttagtgtttaattattcgtattagtttgcggaatgtcgttatttattattttggggaaggaggattttggttttttgggaggtggtattcgggttggggtttttatagggtttttagtttagttgaagtagttagttattttgtgtttttttatttttagg

SEQ ID NO: 96 - DNA, 6326 bp, Artificial Sequence
  chemically treated genomic DNA (Homo sapiens)
tttggggatgaggaagtataaagtgattggttgttttagttgagttgaagattttgtggagattttagttcggatgttattttttagagggttagagttttttttttttagagtggtgagtgacgatatttcgtagattggtgcgggtagttgggtattgagaggtgggacggcgtttagggaaaatagtatttgttaataatttagtatagagtattttcgatgtagagttttaggttgtcgggagttaggagtaggtaggggtgggttttttttttgtatttatgtttttattttttaattttatttttgttttattttattgaaacgttatttatcgtttattaaaatagattttagatttattttcggttattagggattttttaattatcgaatttttattttttttattgattatatttagttgtatttttttagtttttgggtatcgggtattatttttggggtatcgttttttgcggattatgtttttttagttgaacgagggttttttttttttttaattgttggattaaggggaggttaggtaggtgtttgttatttttgggtatttagtatttaaaattttttttatttggagggaatttaaagatagggggaaatagtattttattaattattttagtggttagagttgggggtgagtggtagatattttttttcgagttttttggtgttttagtagtgtttgtggttatagtttagtttattggttattttggagtgacgtgaggtttataggatagtgggagtatttaggggtgataatgtttggggtatagttttattagattttgattggggtgtagttttggttgcgtttttttttttttagggttggtttttattatttgtatttaatagttttattaggtttagtatatggataatgattgttttttaattttattgtaaattgtgttttgtgttttatgggaattttagttttggtatattgttaggagtggaagtaaatgtattttattgtgatatattgagatgttttattattatttgtcgattcgaattaaatttattttagttagggtggaattatattaggaaaaaatgttttgtaatatataaacgatcgtgtttatagattaaagtagggttggttttttttatttttagagaggattttggtaattgattgtgttaaggacggttttttagtaattatgagtatagtttttattttgtttcggttttttatattttagtttcggggtattggtaatgaaaaagtttagattttattttttcgtagtatagtattattattaatgttgatttttaaagagaagaaaagatatttaggatagtaatgttgttaatagaatttatattattataaggaaaattattttaataaagaaaaaataagattaatttgaggtaagaagaagaaaaattagggaattagggaaatttgaagatatttgagattaaaaataagaaaaaattattaggttagttgaagtggttgagatgattttgggaatgtggttttatttgggggaaggtgaagtggttttagtgattttaggttaattttatttttaaatttatgttaggaagatgttggggtttggggatttggagtgatgggttaggttaggtggatgtttggtttttttttttggattggtttttttatttataggtggatttatttggaaagaggaattatcgtggtcgagagtagtatttttcgtttagtaaagtatttggacgttttaggatattttataaaatgtagatgtttaggttgggttttttaggtttttttgatttatgatgggtttgagattttttggttagtcggtttagttttaagtagatattaggattttgttatatttattttttatttattttattttattttttgttttgtaggttatgttttggttaaattaaattaaatattattatcgaagtaaatacgtatttgaagtttttgtgtttgcgtttttttgtttgagagaaagtttcgttaggtttggaggatgtagttggatggtttataggtttagtttaagttttttaatattattggtagggtaagttagtttttttgtgtttatagtttttgggttaggtttttattttaatttatttatattatgttattattagcgattattttatttttaaaataggatacgatgggttttgtgtttgaattattgttggtttttgtaatagttttttgtgtttgatatatgatatttaatatttgttagttaagtaaaagaaaattatatgaattttttttgtttttttagttattataaatgtagtattgatgtttataaatatagtatcgtattaaaaaagaaaaaaaagattcgtattgagataattgggaaatttgttgtgaaaaaaaataaagttagatttttgttttttaaattttattaaaatcgattttagatttagtaaaggtttgagtagaaataatgaaattagaaaatattaggaaaaatatgtgtttttaaaataaattttataagttaggtgtggtagtatatgtttatagtgttagttatttaggaggttgaggtaagaggatcgtttgtttgaggttaggaatttaaggttgttgtgtgttatgattgtatttgtggatagaatagttattttattttagtttaggtgatagtaagattttgttttaaaaaaagtaaaagtaaaataaaataattttagtataaagaaaaattattatttagatgggtatagtggtttacgtttgtattttagtattttgggaggttgaggtgggtggattatttgaggttaggagtttaagattagtttggttaatatggtaaaattttatttttaataaaaatataaaaattagttgggtgtggtggtgggtgtttataattttagttgtttgggaggttgaggtatgagaatcgttcgaatttaggaagtggaggttgtagtgagtcgagattatgttattgtattttagtttgtataatagagcgagattttattttaaataaaaaaaaaaaaaaaaaaaaaagggaaaattattacgtaagtatttttgtggtattatattatgtttaataatattcgtagaagaaatttagaattataatgagtttgtgtttattatatagggagagatttaaagtcgttgtatatatagtagatgagggtatggggaagttaaatgggaataatttttatgtgtagtaatttagggattttttttaaagttcgagtgtatattttagtaattttattttttggaatgaatttaatagtttagttatttattgagtatttattgtatgtttggtttagtttaggatgtagggaatatagtataaagtaatattaggttttgtttttttagaatttatgttgtagtatgggagtaggggagggatagggtagggttgggtgatatttgggagaagagtttaggtagaaggagtagggaaggtgaggtttttggggaggatatggttgggtaggggggtttatggggttgagggagggagtaggggtgtagaatgtgggtttgttttaggggtgttgggaggtagtagagggtttgtataggtgtgggataatttgattttaagtgttaaagggatttttttggttgttatatagaagaggatgaatgggttttgggtagtagtggtggaggatgcgagggaagttagaatttaggtagatttgggatggcgggatatgggagggggaggggaaggtgagttaagaatgatttgaggtagagttgggtatgggtttatatttgttatgggtttatatttataattttagtgttttgggaggcgaaggtaagaggattatttgaggttaggagtttgagaagagtttgattaatataatgagattttatttttataaaaaagtaaaaggaataatttatggttttggtttaggtatgataggaagggattggtagtttgatgtgggattttaggtgtgttaaacgggatttgtttattggatagtttgggtggtttggaggaggtggtagtaatgtggaaggagtttaggttgggggtcgggagatgaggagttagtagggtgagttaggaggggtaaggttttgaaagttataggaaagagtattttagggtagttattattatgtgggggatattgataggttaggcgagatggtagttgagatttgattgtagggtttggtaaatagagttttgggtaattttgatggggttatgtggtgagtgatagatgaaagttgtatggggtgagtttaataaaatttgggagatgggagaaggttggtgtattgtttttttttgttttaggatggtggttgtgttagtatgtttttcgttgatgggattgttttggcgagaaggaaaagagaagttgcgtgtcggaggggaaggaattgttgtagtgatggttttgggagggtgaggggtaagagaggtagtcggttagtatttaggcgatgtagagttgttataaggttgtattttttttggtggaggaggaggtatggtacggttgtttattgagggaggataggtggtgatgttgcgggtaggtttatagtagaggaagtattggatttagttagatgggagagtttaggtgagtaggagggagagggagtgggttagggttcgaggggagagattataaggatagaatttgattttgagttgggtgaagagggaggtgagggttggggagggtttatagagggtgtgttttgtggggtttaggaagtgaggtataagagtaggaagtgggagttaaagaagtaatttttagagggtgggaggtttaaataggaattatagaggggtttgggtggtggtatgttgatttagggagggtaagggttgtgagataggtagagagtgaagttatttggggagatttataggagttagtggtgggttttgataagattgtttatgtggattttgagtttttaggaggtaggatagggtagcgttggagtggttttaggttgggtacggtggtgtttgtgatgaattatattattggggagttttttgtagtattattaattatgataaaaggttagaaataagttggtgtttgttaatagggaggtggttaaataaaagtatggtattttttggtcgggcgcggtggtttacgtttgtaattttagtattttgggaggttaaggtgggtagattacgaggttaggagattaagattattttgattaacgtggtgaaatttcgtttttattaaaaatattaaaaattagttgggtatggtggtaggcgtttgtagttttagttattcgggaggttgaggtaggagaatggtgtgaattcgggaagcggagaatggtgtgaattcgggaagcggagtttgtagtgagtcgagattgcgttattgtattttagtttgggcgatagagtgagattttatttttaaaaaaaaaaaaaaaaaaaaaaagtatggtattttttatagtagagtatttggtagtattataaaggaaagtatttgtttggtatatattaacgtggattagattattgaaataaattatgttaagaaagttgggtatgtaacggtgtgtagagagtattgttatttgtgattatatatatgtgtgtatacgtgtgtatttgattatgaagaggcgatatgtttggatggaacgtaaaataaatagtttaagtaattatttggagtgggtgttagggtttggaggttagggttgggggtgtttttttattatatttttttttgtattttttatatttagcgtttggatataggtgattgagggataagaattaagataagggattttataataaaattagaaaaataaaggagggttgtaaagggtattgtttagaaaggatgttaaaggaatttttttattaaaggggtttttgttgtttattatgttgtgtaggggaagaggtttaaggtcggttttgggttgttaattttgttttttatttaagagattataggattatagtgaaattagtaattttgattagaaagttgttttaaataaaatgataatttgtttttttttttaaaataagtaagtggatgttttttttaaatgtataattattttatagtgaaagagtcgaggttttgtggaatgacgatattgtttgtagatgagttttttggtttatgatagttttagttgtattttttaaggttttgttgcgtatttattttttttttttgtgcgttagtaggtttcggtttaggttattttttttttttagtttatttgttttgatttt

SEQ ID NO: 97 - DNA, 6156 bp, Artificial Sequence
  chemically treated genomic DNA (Homo sapiens)
tagtttgagtttgtattatattatgtttggattattaggtgtaaatattattagtgttttagaattatatagtgaattagtatttttggttattaatttttatgtttattttttaatttttaatttttagttgttttaagagtttaatgtttttaaggtagggattttgttattttgaaggatattatgaatatttgtagttttatgtatgttataaatgataataaataaaatgtatattgtatagataagaatagtagtttattttataagatatatggtaatatatgttttaagattagagttttgaattggattatatttaattacggttaatgaatttttgggaattttaagtattaaaaagttatagtattattttatttttgaatgattaattatgaaaaaaatgaaataaaaggattggtagaaggtttaataattttagagtatatttaattgttagtatatatgtatttatttaatttgtagttttgagatggtaaaaattttgaagtatatatataaagtagaaaatttggttgtttaattaattttttatttaaataattaatggaaaattaaatttaataatgtttatatataatgagttaaagatatttatttttaagtttgatatggtattgtatgtatgtatatatatatatatatgtatatatgtatatatatatgtttgtgtgtatatatatagatatagatatatatttaaattttattagatttaaaaggtaaaaggaaattatttagatttaatggatataaatattttagaaaggaagattttaagagagtgtatatatttatagtaatagcgataggaataattaaatattagaatatttatagttttagtttgttaaaatttgataggttgattattattaataggtattatgatgggtagtaataataattagtagtatagtaatttaagtgtatattatttttttatagattaaaaattatttttttagtaagtttatatagttattttatagttaggattgtttaaaaatttttgttatttttagagttttaatatttattatgtgttattagttttagtattaatattattttttaatttttagttgttttatagtgatttagatggtttataattataatgaattaatgagatttttttacgttattagaggaaatgtgaaatataatttgtaaattaatattagtatatatgtcggggttattgattgtttgtttttaagtaatataaattaatgaaattaatttttttaatttatattattaagtttttttagtgattttacgtaaaggtattgggggataaaattttggaagaaaaaaatcgttgatataattttaaattatttttagtatataaaagaagagttatattttgatttgaatttatgtagttagtttttattaatgagagtgatatttgggggttgaaattagtgttttggtttttaaatatgattagatggatttattgtgtgggaggtgaataaagttaagataaaagataataattttatttagaagaaaatatagttgaatagatgtaattttagttaattaatataggatgggttggtatatatataatattatatttatttatttaaaaaattgtttaggtgttgaaaaattgttgtggtattttttggaaagtaatttttaatataggtaaatgggtgagttttgtgtaaagttagaaagagtattttggaaaatgtttgaattttttttttaaatatatttataattaatttttaaataatattttttttagattggaaatttgtattttaaattatttttagaaaaaaaaaatttttattttttttagaattaaaatatttgtaaaatataggattatattggaagtgttgatatggttttaagggtagtaattgtaaaagtgttattaaaatatattattataggtatatttttatattagttaattggtatattaatttttttgaaagagtgttaaagaagaagtataaagtataatattttgagtttatgatatattttggggaagaaattttttgtaatttttaaattagtatgaaaagttatattattaagatttttatagtaaagttattggatgaagttttttatttaatgtgatataaaagtaatttttgaaattttggaaagttaataaaaatatatggaatattaagtagaggtaaagaagggattgtaattaaatttagaataacgaattaaaatttttttatggttttgatatggtaattataaaatgtagggttattataaagtttgaaattatagaatattatagtatttttaagaaatattatgatattatatttttaaggtttaattaggtaataagatttgattttttgatggtatatttagttatttaacggataatatacgtttatttgtatttttataagtaaatatttatatatatcggaggttaatttttgtttttgtggtaattgttttataggtaagtttagtagtttttaatgaagtagaattgaaatatttttgggggaaagttatatttttatttaagtatatgtattttttttcgggattatgttatagtgtaatgtaaattttagttatggtatttagaatgttagaatgttatattttgtgttgatttgtatattttaatagtttggagtagttgaagtagttaaattatttagttttgggaaggttggaattttcgtaagaattatagtgatttatgtgtaatataatatgagaattagattttttgaagtattaattattagaggtattattaataataacgggttaaaaaagaggaaaaatttttttaaaggataatggattagtatttttagttaatttgtgattttaaattttgtttgatggagtttaattttattttagtcgaggtatttttgttttttattattggtttttttgttatttatttttttttttttatggttgttgtaaattttttttattttttttttatatttgataaaattttttttaaattttgtttaagttttgaatggaatagtaatagtattacggtaaggtggttttattttatttatttttaggaaaattttatatttattagagtttatattaaagtagaattttttattgtttattttgaaagaagttttttttgggagtttaagcgggttatcgtttttattttttcgtttttttatgtttttttcgttatagtttttaattagttgaattaaggtattacgaaatttaattattttttgtgttgggaggataatagtttgtttttggtttaaattgtggttaaaataatttattatgttagtttttcgtattatggtttgtttaattcgtaggaagcgatttcgttgatttttttttaggtttaggtaatattttttattgtttttttcgatatagtttgtttttaggatattgtgaggatgtttttcggattttatcgagattggtggggagggtgtcgagtgtttttgtttttttttggagttttgttttttgttgtggttatgtttttgtcggtggttttttaggtttaggtgggtatagtgttcgatgaagttttttagatagttttttagtttcgttgttatagatagggagagggttagtttattttttttgatgttgttttgtcggtttttttttatttagatttcggttatttttaggaagcggtttcgggagttttgttttacgtttaggtaaaatttttttttttggatgtttattcgtttggaggttagtttttggatttcggttgcgttttcggtttgattaggggtggttgaggtcgcgtagtgggggtagtgggagtgttgggtttggggatagagtttatttttgtttaggttagagttttttatatttttgttttcgcggtcgcggtcgtcgtcgtttttttttcgtttggttttttttatttttagttgtaagtaataaatagatatacgggatggggtgggggaggggtgttgagaataatcgtagacgtttttcggtttgatcgtttcgtcgtcgttcgcgatttttacgtcgggttcggttttttcggcgtcgtagcgcggggttttagttattgtcggtcggttggcggtcgtcgtttcggttttgttcgcgtttttcgtattttttcgtcgttttcggggtcgttttcgtacgtcgtcgtcgttcgtttcgcgtttcgcggttttaggtttttagtcggcgggtatttatattatttttgttattatcgtcgtcgtcgatgttttttacgattatcgtcgtcgttatcgttagttttcggtttttttgttgtagtcgtcgtagtcgtcgtttttcgttttttttttcgtcgtcgtcgttcgtattgtttttcgtcggagtagtcgggtaggggtatcgttcgcggcgtttatcgtagtcgttttttttgcggtcgttgcgggggtcgtcgtttgatttcggatatcggtttcgtattcgttaggaggggagggaaggggaggcggggagagcgacggcggggggcgggcggtggatttcgtttttttcggtatagtttgttgaggggaagagggggttttcgtttttttttagtgtattttttgattgaagttcggcgcgtggggtgtagcgggagtgcgaggggattggataggtgggaagatgggaatgaggatcgggcggcgggaatgtttttattttttcggattttatcgggatgtaggattttagttgtttagtcgtatttgcgaagagattatatttttcgaggtgtttagcggtagcgagggtttttacgtatgcgtatcgcggcgcgttgggcggggttggatgggttgtggtgggagggttgtagcgtcgcgagaaaggcgagtcgggtcgggggcggggaaaggggtggggtaggaacgggggcggggacggcgttggaggggcgggtcgggtaggtttttcggagttgatgtgtattgtgtgcgtcggggaggcgtcggtttgtattcggtagcgcgggaataaagtttgttgatttggtgtttagtttggatgtttgggttgtaggttttgtttgtggtggcgttttatagttattcggttgaagaagatttgttggattggattttttcggggtaaagtgtttttttattttcgtttttttagtttcgtgtttcggggtatttatagtgttaggtttttgagatacgtggaggcgtttaggttcgcggagtaggtttttgggttgtgtttgggagattttggaaaaatagatttttttttttttttttttttttttggagtagttgggaaaggcgtttttcggagttttcgttatttagaaagtgttttttcgttttgacggttttagtttgatgtttattttgcgcgtttagttaggattgttttttttagtacggtttttattatggtagaaattgagttattataggtttgtatagtaaagtcgagggaaataatttgttgtttatgatttagtaagtgatgatggatatttttgagtttaaattatttagtttttaatggattttttttttttttttttttagttgaattttagttgtttttaggttaggtttgatatgaaaaatattattttttattgaagagggtaatataatttttaggatgttaatataggagtttgtaagtcggagtattttaggttttttatggttcggtatatttttttttaggggtgggatattgggataagtaggatagtttagattttgatgttattgaatagtggtgtttatttaaaaggaagaggttggggtataaaattataatttaaagtgtttattttagttaaaatgaggatagttgtttaggatttattttttagttgttttggggagtgtttttttagttttggttataagtaggtttttaaaggcgaaggggaagagtgggttgagataaagttggttaggaattgttattggtttatagagatattattgtttagtgattggttgtatattgtaatttatagggtatgagttatcgtgtttagtatatggtattttatggttttttggttttagtttagagtttatatagtaggtgggttttaagagataattatttagtttagatcgggagtgagat

SEQ ID NO: 98 - DNA, 6156 bp, Artificial Sequence
  chemically treated genomic DNA (Homo sapiens)
gttttattttcggtttgagttggataattattttttaaagtttatttgttatatgggttttagattggaattaagaagttataaaatgttatatgttggatacgataatttatattttatgagttatagtgtatagttaattattaagtaatggtatttttgtaaattaataataatttttgattaattttgttttagtttatttttttttttcgtttttaaaaatttgtttgtaattaaggttgaaggagtattttttaaggtaattgggaaatgagttttgggtagttgtttttattttggttgaagtaaatattttaaattataattttgtgttttagttttttttttttaggtagatattattatttaatgatattaagatttgaattgttttatttattttaatattttatttttaaaaagaaatgtatcgaattataaaaagtttgaagtatttcgatttatagatttttgtattagtattttaagaattatattattttttttaatagggagtagtattttttatattaaatttagtttgagaataattgagatttaattaggaaaaaaagaaaagaaaatttattaaagattgagtgatttgaatttaaaaatatttattattatttgttaaattatagatagtaggttatttttttcgattttgttgtgtagatttgtagtggtttaatttttgttataataaaggtcgtattagaaagagtaattttaattaagcgcgtaaggtaaatattaagttggggtcgttagggcggggaaatattttttgaatggcggaagtttcgagagacgttttttttagttgttttagaggggaaaggaaaagggagaaagtttgtttttttagaattttttaaatatagtttaggggtttgtttcgcgggtttaagcgtttttacgtgttttagaagtttagtattatagatatttcggggtacggagttgggaaaacgggaataggaagatattttatttcgagaagatttagtttaataggttttttttagtcggatgattgtggagcgttattataagtagggtttgtaatttaggtatttaggttagatattaaattagtaaattttattttcgcgttgtcgagtataagtcggcgttttttcggcgtatatagtatatattagtttcgggagatttattcgattcgtttttttagcgtcgttttcgttttcgtttttgttttattttttttttcgttttcggttcggttcgtttttttcgcggcgttgtaatttttttattatagtttatttagtttcgtttagcgcgtcgcggtgcgtatgcgtggaggttttcgttgtcgttgagtatttcgggaagtgtagttttttcgtaggtgcggttgggtagttagagttttgtatttcggtggaattcggagaagtgagaatattttcgtcgttcggtttttatttttatttttttatttgtttagttttttcgtattttcgttgtattttacgcgtcgggttttagttagagagtgtattgaggaagagcggagatttttttttttttttagtaggttgtgtcgggggaggcggggtttatcgttcgtttttcgtcgtcgtttttttcgtttttttttttttttttttttggcgggtgcggggtcggtgttcgaagttaggcggcggttttcgtagcggtcgtaggaggggcggttgcggtgggcgtcgcgggcgatgtttttgttcggttgtttcggcggggggtagtgcgagcggcggcggcgggggaggaggcggggggcggcggttgcggcggttgtagtagaggggtcgagagttggcggtggcggcggcggtggtcgtgaagggtatcggcggcggcggtgatggtagagatgatgtgagtgttcgtcggttggagatttggggtcgcggagcgcgggacgggcggcggcggcgtgcgggagcggtttcgggggcggcggagggatgcggggagcgcgggtagagtcggagcggcggtcgttaatcggtcggtagtggttggagtttcgcgttgcggcgtcgggggagtcgggttcggcgtgggggtcgcgggcggcggcggggcggttaggtcgaggggcgtttgcgattgtttttaatattttttttttattttatttcgtgtgtttgtttgttatttgtagttgaagatggaaagagttaggcgaaggggaggcggcggcggtcgcggtcgcggaggtaagaatgtagggggttttggtttaagtaagagtagattttatttttaggtttagtatttttattatttttattacgcggttttagttatttttaattaggtcgggggcgtagtcgaaatttaggagttggtttttaaacgagtggatatttagaaaaagaggttttatttagacgtgaagtaaagttttcggggtcgttttttaaagatagtcgaagtttggatagggagaggtcggtaggataatattagaaagagtaaattgattttttttttgtttgtggtagcggagttgaaggattgtttaggggattttatcgagtattatgtttatttgggtttgaaaggttatcggtaagagtatggttatagtaaagagtaaggttttagaaggaggtagaagtattcggtattttttttattagtttcggtggggttcgaagagtatttttatagtgttttgaaaatagattatatcgagagggataataggaaatattatttagatttaaaggaaaattagcggggtcgttttttacggattagataaattatgatgcgggggattggtatgataggttattttggttatagtttgggttaagaatagattattgtttttttagtataaggaatgattgagtttcgtgatgttttggtttagttgattgaagattatggcgaaggagatatagaagaacgaagaggtggagacgatgattcgtttgaatttttagaggggattttttttagagtggataataaaaggttttattttgatgtgggttttaataaatatggaatttttttgaaggtaagtgaggtgagattattttatcgtaatattattattgttttatttaaagtttggataaggtttggggagaattttattaagtatgaagaagagatgaggaaaatttgtaatagttataaagaaaagagaatggatggtagaaaggttagtggtgaagaataagaatgtttcgattagagtgaaattgaattttattaggtaaaatttaaaattataaattggttaaaagtattgatttattattttttgaagaagtttttttttttttttggttcgttgttattagtaatatttttagtagttgatattttaggaagtttgatttttatgttatgttatatatagattattataatttttacgggaattttaatttttttagagttaaatagtttagttgttttaattgttttagattattgaagtatgtaaattagtataaaatgtgatattttgatattttaaatattataattaagatttatattgtattatgatataatttcgaaaaaagatatatatatttaaatagaagtgtgatttttttttaaaagtattttaattttattttattaaaagttgttaagtttatttgtagggtagttattatagaaatagaaattgattttcggtatatataaatatttatttataaaagtataagtagacgtatattgttcgttgaataattgaatatattattaaaggattaaattttattatttaattaaattttaaaaatataatgttataatattttttaagaatattatagtattttataattttaaattttgtggtaattttatattttatagttgttatattaaagttatgggagagttttaattcgttattttaagtttagttataattttttttttatttttatttaatgttttatatatttttattgattttttaaagttttaggaattatttttatgttatattgagtgggaggttttatttaatggttttgttatggaaattttggtggtgtagttttttatgttaatttaaagattgtaagaggttttttttttaaaatatattatggatttaaggtgttatattttatgttttttttttaatatttttttagaagggttggtgtattaattaattgatataaaaatatatttgtaataatatattttagtagtatttttgtaattgttatttttaaaattatgttaatatttttaatataattttgtattttataggtgttttaattttggagggggtggggattttttttttttaaaaataatttagaatataaatttttagtttgagaaaaatattatttgaagattggttataaatatatttgaaaggaaaatttaggtattttttaaggtgttttttttgattttatataagatttatttatttatttgtattaaaaattattttttaggaagtgttatagtaattttttaatatttaagtaattttttaaataagtggatatagtgttatatgtgtattaatttattttgtattaattgattgaaattatatttatttagttatatttttttttgaatgaaattattgttttttattttggttttatttattttttatataataagtttatttaattatatttaagagttagaatattgattttaatttttaaatattatttttattgatgagagttggttgtatggatttaaattagaatgtagttttttttttatatgttaaaagtaatttaaaattatattagcgattttttttttttagagttttgttttttaatatttttacgtgaggttattaagaaaatttgatggtatgaattaaaaaaattaattttattggtttatgttatttaagaataagtaattagtaatttcgatatatatattagtgttggtttgtagattgtattttatattttttttagtagcgtgaaggaattttattagtttattataattgtggattatttggattattatggaataattgaaggttaggagataatgttagtattagagttaatagtatatggtgggtgttgagattttaaaagtagtaaggatttttaaatagttttaattgtaaaataattatgtaggtttgttaaaaaagtagtttttggtttatgaaggaatgatgtgtatttgaattattgtattattgattgttattgttgtttattatagtgtttattaataataattaatttgttagattttggtaaattggagttgtgaatattttagtatttgattgtttttatcgttattgttatgagtgtatatatttttttaaagtttttttttttaaaatatttatatttattaggtttaaatgatttttttttattttttgggtttgataagatttgggtatgtgtttatatttatatatatatatatagatatatgtatatatatgtatatatatatatgtgtgtatatatatatataatattatgttagatttaaagataaatatttttaatttattgtatataaatattattaaatttagttttttattaattatttaagtaaagaattagttaagtagttagattttttattttgtatgtatattttaaagtttttattattttaaagttgtagattaaatagatgtatatatattggtaattgagtatattttaaaattattaagttttttgttagtttttttgttttattttttttatagttaattatttaaaaatgagatgatgttatgattttttgatatttaaaatttttaagaatttattagtcgtaattaaatatgatttagtttaaaattttggttttaggatatgtattgttatgtattttataaaataagttattatttttatttgtgtaatatgtattttatttattgttatttgtaatatatatggagttgtaagtgtttatggtattttttaaaataatagaatttttgttttgaagatattaaatttttaaggtaattggaagttagaagttaaaaaatgagtatgaaagttagtaattaaaagtattagtttattgtataattttaaaatattgatgatgtttgtatttaataatttaagtataatgtggtataggtttaaattg

SEQ ID NO: 99 - DNA, 6801 bp, Artificial Sequence
  chemically treated genomic DNA (Homo sapiens)
atatattatattttgtttatttatttattagttgatgggtagttgggtagtttttagtttttggttattgtgaatagtgttacgtgaacgtttgtgtgtaagtttttttttatatatttgtttttagttttgtgggaatatatttatgagtggaattattgatttatatggtaattttatgtttcgtgttttgagggataaattgtttttcgtggtagttgtattagtttatatttttattaataatgtatgagggttttaattttttttatatttttgttaatattttttttttttttttttttttgttttttttttaaattttagttattattattaaagattataaaggttattttgattaagtttttttgggaggtttgagggttattttttagttttttaagttttttttagacgttgggggttgattgggaaatgaagtgtaaatgggtaggtagattttgtttttattggtattagggtttaaggtggtataattagttatggtttttgaaatgcgggagaagaaaagagtagggtttttattggggttttgagtgattttttttatttttttagagtttatagttttaagggtagttttatttatgttagttaggaggtatgatattatatagtttcgtttttgtttgtttgaggaaattgttttataattttaattggggttagttttggggatagttagggtttttataaggttatgggtagtattttgttggtggagggtgtttgtatgggtttgggtggttgtttggatatattttttgttattcgggatgagggaggagtagaggatgatataaacgttatgttaggtaaggttataagatttagtgatatatagaaattttttgtgggaggagttggggtcggtggaaaaggagttaagtttttttttaagttgggagaggttggttagggagaagggaatatgaatttggattatgttttcggttttaatattttttttaagggaaggattttgtaagatttttggtagtgggagtgatttttggtagaagggggttgggtgtaagatcgggtgtgtagtggagaaggaaggttgggatggaggattaggataagggggtgggggagcggagtcgaaggagaaggaggaggggatggtggtgggagggggattgagagagggggtttgttggtagggttgaaattataggaggaaggtttgtttggaggtgtgaagtggtattttattgtgttttaatttgtatttttttaatgattaatgatgaatatatttttatgtgtttgttggttattagtatatttttttcggaaaaatgttaatttaagttttttgtttatttttaaattgggttgtttttttgttgttgagttgaaagtgtttgttataaattttggatattagatttttattggatatttgatttgtaaatatttttttttattttgtggggtttttattttaattttttttatagtgttttttgacgtagaaaagtttttaatttttttttgatttttgaattttttattggttttttgttttttaaagtgtattttgtttttgttggtttaatgttttagaattttggtgtcgttggttagatattattttgttatttattattcggcgggtggtggttttttggatggtttgtatggagttgttgttgtttagggtattattaagattgaagtttttgttattttttagtaggtagtagtaggtagtgtttttagtttttagtttgattttgatgtttagtagggttttgtatttttgagtttggtattgtttttttgttcgggtttgtgttagttttgattttaggtgtagtaggatttcgttgagttgttttttttgtaaggtatagcgggtttcgattttttttaggttgttttttaagttggtttttagattttttatggagtttaggttgatttttaaggattggattatatattttagtttcgtgagtattattttagtagttttaatttcggtggattgcgtggtgattattgaggtgttttttttaatttgttgagattagtatttgtttagttttttttagttttttcgagttagtttattatattggggtcggatgtttgttatgattttggtaaggtttcgagattgggggtatttatttttatggttaatttagagttggtaatttaggtttgtaggttttttgtaatgtttaattttatttttttttttttatttaggtttgtttttatttgaatagatttttttttagttaagagaattagataaattttattttggtttttttattggtagttttttttttaaggatttaatttgtgtaagttgatttttagtatatttaagaatgtaattaattgataagatattgtggtaagttatatttatagtttttaagaatttatttgtttgataacgtttaaagttttgtatttataattttgtaatagttttaaagtttttgtatttggaattgtttatttttttgtaattatttatttttttaattttttgattatttaatttttgtaaaattgttttaattagacgattttttttttttaaattaaggtataaaagttaattaagtttttttttcggggtcgagagaattttgagcgttagtcgtttttcggtcgtcggttaataaaggatttttaatttattttaaagtgtggcgtttttttaattcgttcgggtataatatttttatttttttttcgtggtttttttttatgaagagtagtttttttttgagagtttcgatttttgtttttagttgtagtcgagtgatattggtgttattagtgattttcggagtttatggatgtggttttttatagattggcgtatggttagttttgttttatatttgattttaaagttattagtagtaagattagtattgttaatttgtagaataatgtaggtattgtttatagtatttgtgaagatttgagtttttaggtttttaatggttttgaagtaatggtttatttttgatttggggtttttttttttataggtgtttttggattttattttttagtttttagtttttggtttttaggttttttattttgtttaggtaggaggttaggtagttgtttaggttttgtacggttttttttttgttttggatgttttttatttttgttagatttttggttattttcgcggttaggttttcggaatttatgttgtttaggtagttggtggagcgggatatggagattcgggaattagagttttcgtgtttgtatagacgttggttatgttgttgattagtcggatatcgtagttgggtgtttggatagaatttagggatcggtagttggtggagaaggtggagcgagtggtgaagtttatgttgtttagggaggagagtgagaggataggatttaggttttgtcgacgattttaatttttttttgagataagatgttattgtgttgtttaggttggagtgtagtggtgttattatagtttattgtagttttgattttttgagatgggtttttgttatattgtttaggttggttttgaatttttggttttaagtaatttttttgtgttggttttttaaagggttgggattatagatatgagttattgtattttgttaattattattattttttaatagtgatagggttttattgtgttgttttagtttgttttgaatttatgattttaagttatttttttgttttggttttttaaattgttgagattataggtgtgaattattgtgtttagtttagtttttaattttaatgaagtttagtttttttttttttgttgtttgtgtttttgatgttatggaatttgaaatagttttatttgggtaagattgatgggtagggagaaagaaggatttgaggggaagggagatggggatggtttgagattttatttttaatttaatttaagattttagtaggtaattgttttatacgaggttttgtagttttatgtatatatgatcgataaattagaatattgaattgtgtttttgaaaggttaattattgaatattagtgggaaatattagtgtgtgaggttgtttttttaaaagttagttttaaatggtatatgtagtaattagaagttaatgttttttggttttaattaagtattatttgtaataaagggaaagtatatatttttgggaaagtttgttatgttttttttgttatattagttatatttttgggaagttaggatatttggtttagatttaaatttattgtttatttggtagtagtttatttttattgaaggaatattttatgggaaagatagttaattttatgtatattagttttggagtaagttttgtatttgtttgaggttatatagtaagttaattgggagttttaatttaggtttttttattttaaatttaaggttgtgtttttaggtcgtgtatttaatataaaattaggattattatttgttgggttttatgattggtattattattatttattgttattattttttgaggttttttacgtgttaggttattgttttggtaatttaatttttttaaagattcggtaaatggttttataattatttttattttattattgaagaaattgaattttggttaaataatttgtttaaggttatatagattttaattgttaagagtttagatttaatttaggtttgattttaaagtttatattttgaattattaagcgagatttattttaaaggtgattaggtcgtgagatatgattttagtacggatttttttttcggatgataagagagtaggtagttaggcgggtatttcgtgttcgcgtatatttagatttcgtttagcgttcgggtaggttatttcgagttttttaattgcgtaggcgtttttatttagaaaggtcgttgggtgcggggagcgtagaggcggtgtagggcggttggttcgtttcggcgtgtagtgcgcgtgcgtggagttgggagttaggttttcggagtgggtcggagatggcggcggtcgacggggttttgtcggaggcggcggttttagagtaattcgcggagttgtttgtttcggtgcgggcgagtatcgagcggaagcggtagcgggtattgatgttgcgttaggttcggttggttgttcggttttattcggcgacggcggttgcggttattggaggtttgggtcgcgttcgcgtttttttttttttttttttcgttttttcggtttttagattggttcgtgtaagtcgagtttcggggttcgggggtcgcgttaatttcgttggcgtatgtgtgtagatttttttcgagtcggagagggaattcgtttagttagtcgttttgttaaagcgttttgtttacgattatagagcgtttttttgtcgtacgcgggttttttgatttttagtttcgggtttttttcgttgtatttcggttgttggtagtttcgatttttcgtttagggatgtagtcgtttcggtcgggaggtgttagttattgttaggtgttagggttttagttgtttcggaaagaggagttagattagtttttgattttggtttttatatttagaattagttgatggaagaggtagattttggtgtttgttagggagagtttttaataattagagttgttaaaagtgtaatggattgttttttatgagtttttcgttattagaagcgtttaaataggaattggaagaacgtttatttatgtggaggagaggagatttagtaattagaattttttatttagtaattagaagaagggattggatagtaaatttttaagattttaatttatagattttatgagtttattttttggatatgtgatttttgcgattttttggtaaaaattagttgtttaaaacgtgtttattgattgaagtaaattaaggattgtttttatgcgatattggtattgttagttttttttattttagatattttggtgagagtttaatgatattttattatggttttaatttgtatttttttaatgattagagataatgagaatttttttatgtgttttttggtcgtttggatatttttatttgtgaagtgtttgtttaaattttttgtttgtttttaaaagttgggttgttttttattgatttagaggattttattatgtattttgaatgtgagttttttgttagatatgtatacgttagattttttttttttaaggttttattttttgtggttttagttatttataattaattatggtttaaaatatgaaatggaaattttcgggtgtatacgtgcgtacgtatatatatataacgtattttattgttggagttttagttgagattattttgtatttttagataaatttgtgaagaattgacgtttttataatattgaggtttaaaatttatatatagtatatttttttatttaagttttttttgattttttttagtgttttgtagtttttagggtagaggttgtatatatttttttttaggttgttattttttaattttaattgtagatttttgtggatattttatatatataattatattatttgtgaatagatgttgttttatttttttttttttattttttatgtttttttggtttttttgttttgttagattagttgggatttttagtataatgttgaatagaagtagtgattgtggatatttttgtgttgtttgagatatattgaatttaaaggaattttttatttatgaataaggtaatatataggtttatttattttaattgttgattgtttttatttatttttgtagg

SEQ ID NO: 100 - DNA, 6801 bp, Artificial Sequence
  chemically treated genomic DNA (Homo sapiens)
tttataaaagtaagtaaaagtagttaataattgaagtaggtaagtttgtatgttattttgtttataaatagaaaatttttttgaatttaatatattttaaataatataaggatgtttataattattatttttatttaatattatattgaaggttttagttagtttaatagagtaagaaaattaaaaaggtataaaggatgaaaagaaagaagtaaaatagtatttatttatagatgatgtaattatgtgtgtaaaatatttataagaatttataattagaattaagaaataataatttaggaagagatgtgtataatttttgttttgaaaattataaaatattaagagaaattaaaaaggatttaaatggagaaatatattgtgtatggattttaagttttaatattataaaaacgttaattttttataaatttatttaaagatgtaaggtgattttagttagaattttagtagtggggtgcgttgtgtgtgtgtgcgtgcgtacgtgtgtattcggaaatttttattttatattttgggttatggttgattgtgggtaattaaagttatagaaagtgaaattttggaaaagggaggtttaacgtatgtatatttgataaaggatttatatttagaatatataataaaattttttaagttagtaaaagataatttaatttttaaaaataggtaaaagatttgaataggtattttataaatgaggatatttaaacggttaaaaagtatatgaaaaggtttttattatttttaattattaggaaaatataaattaaaattataatgaagtattattagatttttattagaatgtttaaaatgaaaaagattgataatattaatatcgtatggagatagtttttaatttattttaattaataaatacgttttgagtaattagtttttgttaagaaatcgtagaggttatatgtttaagaaatagatttatggaatttatggattagaattttaaaggtttattatttagtttttttttttgattgttgagtaggagattttgattgttgaatttttttttttttatataagtaagcgtttttttagtttttatttgagcgtttttagtaacgggaagtttatgagaagtaatttattgtatttttggtaattttaattgttgaaagttttttttaataaatattaagatttgttttttttattaattagttttaggtatagaggttagaattaagaattagtttaattttttttttcgggatagttgaggttttgatatttggtagtggttgatatttttcggtcggggcggttgtatttttaaacgaaaaatcgaagttgttagtagtcgaggtgtagcgaagaaggttcggggttgggggttaggaggttcgcgtgcgatagaggaacgttttgtggtcgtggataggacgttttgataaggcggttggttgggcggatttttttttcgattcggggagaatttgtatatatacgttagcggagttgacgcgattttcgggtttcgggattcggtttgtacgagttagtttggggatcggggaggcggggagagggaaggggaaagcgcggacgcggtttaaatttttagtagtcgtagtcgtcgtcgtcgagtagggtcgggtagttagtcgggtttggcgtagtattagtgttcgttgtcgttttcgttcgatattcgttcgtatcgaggtaggtagtttcgcgggttgttttaaagtcgtcgttttcggtaaagtttcgtcggtcgtcgttattttcggtttatttcgaggatttagtttttagttttacgtacgcgtattgtacgtcgaggcgagttagtcgttttgtatcgtttttgcgtttttcgtatttagcggtttttttgagtgagagcgtttgcgtagttaaggggttcggggtggtttgttcgggcgttgggcggagtttgggtatgcgcggatacggagtattcgtttaattatttgtttttttgttattcgggagaagggttcgtgttgagattatattttacgatttggttatttttaaaataggtttcgtttggtgatttagagtataggttttggagttaggtttgggttaagtttgagtttttgatagttaaagtttgtgtgattttgggtaagttatttaattagagtttagtttttttagtggtaaaatgaggataattatggaattatttatcgagtttttgggaggattagattgttaggataataatttggtacgtagaagattttaaaaaatggtaatagtgagtagtagtagtgttagttatagagtttaatagatgatagttttgattttatgttggatatacggtttagagatatagttttagatttaaaatgagaagatttgggttgaaatttttagttaatttgttgtgtgattttaggtaaatgtaggatttgttttaaggttgatatgtataaggttggttattttttttatggaatatttttttagtgaggatgagttattgttaggtagatagtgggtttggatttgggttaaatattttgattttttaaaagtgtggttagtgtaataaaagaaatatagtaggtttttttaaaaatgtatgttttttttttgttataaataatgtttaattgaaattagaaaatattaatttttaattattatatgtattatttaggattggtttttagaaagataattttatatattgatgttttttattaatgtttaatggttaattttttagaaatataatttagtgttttaatttatcggttatatatatataaagttgtaaaatttcgtataaagtagttatttgttgaaattttaggttgaattggagatagaattttaagttatttttattttttttttttttagatttttttttttttttatttattaattttgtttaggtgaaattattttaaattttataatattaaaagtataagtaataaaagaaaaaaagttggattttattaaaattaaaaattaggttgggtatagtggtttatatttgtaattttaatagtttgggaggttaaggtaggaggatgatttgaggttatgagtttaagataagttgaggtaatatagtgagattttgttattattaaaaaataataataattggtaaggtgtagtggtttatgtttgtaattttagttttttgggaggttaatataggaggattgtttgagattaggagtttaagattaatttgggtaatgtaataagaatttattttaggaggttaaggttgtagtgagttgtgatggtattattatattttagtttgggtaatataataatattttgttttaaaaaaaaattaaagtcgtcggtaaagtttgagttttgtttttttatttttttttttggatagtataagttttattattcgttttattttttttattaattatcggtttttgggttttgtttaggtatttagttacggtgttcggttggttagtagtatagttagcgtttgtataggtacgggggttttggttttcggatttttatgtttcgttttattagttatttgagtagtatgggtttcgggggtttggtcgcggggatggttaggggtttggtaggaatgagaggtatttagaataagaaggagatcgtgtaaaatttgaataattgtttggttttttatttggatagaatgaggagtttggaggttaagaattggaagttggagagtaaaatttaggagtatttgtagaagaagggattttaggttagagatgagttattattttaagattattgagggtttgaggatttagatttttataaatattgtggataatgtttgtattgttttgtagattgataatgttggttttgttgttgatgattttagagttaagtatgagatagagttggttatgcgttagtttgtggagagttatatttatgggtttcggaggttattgatgatattagtgttattcggttgtagttggagatagagatcgaagtttttaaggaggagttgttttttatgaagaagaattacgaagaggaagtaaaagtgttgtattcgagcgagttaaaaaaacgttatattttgagatgaattaagagttttttattagtcggcgatcgagagacggttaacgtttaaaattttttcggtttcgaggaaggggtttgattaatttttatattttggtttagaaagggggggtcgtttagttaaaataattttatagaagttaagtagttaaaaagttaaaaggataaatggttataggaaagtaaatagttttagatgtaggggttttaagattattataaggttatagatgtagggttttgggcgttattaaatagatgaatttttggggattgtggatatagtttgttatagtattttattagttaattgtatttttggatgtgttgggagttagtttgtataagttaagtttttgaggaaggggttgttagtgaaagagttaagatggagtttgtttggtttttttagttaagggagagtttgtttaggtggaaataagtttaggtgaaaaaggaaaaatgaggttgggtattataaaaggtttataagtttagattgttagttttgggttgattatggaggtagatgtttttagtttcgggattttgttaagattatggtagatattcggttttaatatgatgagttggttcggaagaattgagaggagttggataaatattggttttagtagattgaggagagtattttagtggttattacgtagtttatcgaggttggagttgttgggatgatgtttacggagttgagatgtatagtttagtttttgaagattaatttggattttatgagaaatttgaaggttagtttggagaatagtttgagggaggtcgaggttcgttatgttttgtagagggagtagtttaacgggattttgttgtatttggagttagagttggtatagattcgggtagagggatagtgttaggtttaagagtataaggttttgttgaatattaaggttaagttggaggttgagagtattgtttattgttgtttgttggaagatggtaaggattttaattttggtgatgttttggatagtagtaattttatgtaaattatttaaaagattattattcgtcggatagtggatggtaaagtggtgtttgattaacgatattaaagttttgagatattaagttagtagaagtagggtatattttggggagtaggaggttaataaaaagtttagaggttaaaaaaaaattgaaaatttttttacgttaaagaatattatgaagaaaattggggtaaaaattttatagaatgggagaaaatatttgtaaattagatatttaataagggtttagtatttagaatttataataaatatttttagtttaataatagaaagataatttaatttaaaaatgagtaagggatttaaattgatattttttcgaagaggatgtattgatggttaataaatatatgaaaatatatttattattagttattagggaaatgtaaattaaggtatagtgagatattattttatatttttaggtaagttttttttttgtaattttaattttgttaataaatttttttttttagttttttttttattattatttttttttttttttttttcggtttcgtttttttatttttttattttggttttttattttaattttttttttttattgtatattcggttttgtatttaatttttttttgttaaaggttatttttattattaaaggttttataaagttttttttttgagaaaggtgttagggtcgaaggtatagtttaagtttatgtttttttttttttagttaattttttttagtttaaaaagagatttagttttttttttatcgattttagttttttttataaggaatttttgtatgttattgaattttatgattttatttggtatgacgtttatgttattttttattttttttttatttcggatgatagggaatgtatttagataattatttaggtttatgtagatattttttattaataagatgttgtttataattttatagggattttagttgtttttagaattgattttaattgggattatgaagtagtttttttagatagatagaaacgaagttatatgatattatgttttttagttggtatggataaagttgtttttaaggttgtaaattttgaaaagataaaagaaattatttaaggttttaatgaaaattttgttttttttttttttcgtattttagaggttataattaattatattattttaagttttgatattaatgggggtagaatttatttatttatttatattttattttttagttagtttttaacgtttgaaagaaatttaaaaaattagaagatggtttttaaattttttaaagagatttaattaaagtggtttttatggtttttaatgatgatggttagaatttaaaaaaagaataaaagaaagaaaagaaaagaagtattggtaaagatgtaaaaaaaattggaatttttatatattattggtgggaatgtaaattagtgtagttgttacgaaaaatagtttgttttttaaaatacgaaatataggattattatatgagttagtaattttatttatgagtatgtttttataagattaaaaataggtgtgtgaagaaaaatttgtatataaacgtttacgtagtattatttataataattaaaagttggaaattatttaattgtttattaattgatgaatggataaataaaatatagtatat

SEQ ID NO: 101 - DNA, 7456 bp, Artificial Sequence
  chemically treated genomic DNA (Homo sapiens)
  unsure (2979, 2998, 3001): n is a or g or c or t
gtaatgtagaatttatggtttttttttttaaatttatgttttttttcgtttttttagttttaatatttgttataaagtaaagtttattttttttttatgtttatatatttagttcgttagtaagtttagttagtttagttttaagagtgtattttaaatttgtttatttttttttatttttatgattatagtttttgtttaagttattattattttttagttgagtgattgtagttttttttttattggttttttagttttgtatttagtaatttaaataattttaaaaaaaaaaaaaattatgttttgtttttgttttaaattttttttggttttttattgtttttagtttaaaatttagttgttttattttggtttataagatattatatgttttggtttttgttattttttttgttttttttattatttgtttttttgttagatattttttttattggtttttttttttttttttaaatatgttaagttattttttgagtttttttttttgatgttttttttgtttagagtgaattttttatggtttttattagggttgattttttttatttttttaaaatttaagttagatattttttgagtaaattaaggtggttttttttagatatttcgcggatattaaaatttgtgatgtttaagtattttatattaaatggtttagtgtttttatgtaatttatgtatatttttcgatatattttaaattatttttagattattaataatatttaatataatgtggatattatggaaatagttgttatgttgtattttttaaatttgtattttttttttcgaaatatatttatttgtggttggttgaatttgtggatgtagggttcgtggattggtagggttaaatgttaaataaatattttatttattttttatttttttcgagatagtgttttattttgtcgttgaggttggagtgtagtggcgtgattttcgttttttaggtttaagtgatttttttgttttagtttttcgagtagttggtgttataggtgtttgatattatgttcggttaatttttgtatttttgtatagatggggtttcgttatgttggttaggttggttttaaatttttgattttaggtgattcgtttgtttcggtttttcgaagtgttgggattataggtatgagttattgcgttcggttagtaaatattttaaataattgtaaaatgtaggttgtagaaggaatttttgggttttttgaaaaaattgggtagattagattaggtaatcggtaaaggttattatattagattttgtttttatatcggttataaatttattatttattaggaaatagtgaaatggtaataattcgtaaatttaggaggtgatttattttatatgtaatattacgagttttattttatttatttatttatttatttaaataatattttttgagtatttattatgtgttgtatatgaatgaggtgatatgagagataaatatattttggaggattatagagtagtgttgatatgatatttatatgtaaaatatttaaggtaaagtgtgttaaatattgtggaagaaggtataaggttttgtagtttttaaaggattaattaagtttgattggcgtgatcggggaacgttttttgaagtagtttgatttgtgatttaaaggatggttggtattttagtaaggggttataaaaaggggtcggtattttagttagaatgtaatttggatatatggtaattaaaaatttacggttttaatttgatggaaatgttatttgtattttttttagtttaatattttatttcggttttagtttggtagagttttaatttttagttttatgtatttgggtgaattattttggataaatgttttagtttttttgaattttttttgtgaaatgtaataattgttttgcggggtggttgtgagtttttagtgggatagtatataaagttaagagttttagttttatttatgttaggtaaattagttgggttagttggtgttatttagtttaaacggaggtaaagatgtatttaagtttattttgttagttagaggagttagtagttagtttttaaggtagtttttaggatttgtagagttataatttttgttgtggtttggtggttttgtggggaagtatagatttagtaagtatggtttgggttgtagatgataataatttggtgattgttagtgtagttgttaatattgtaatagtgtaggttttaatagtatttttgtatatgtaaatgaaggtgatatttggttgtttttgataaataggagaaaagaaaataggtttttatatgattttttttgtgttattaaagtatttttggtttttttttattttttttttgtgttaatatttttagtgatatttattaatttttttaatagttgtttattgagcgtttattatttttatatattgttttaggtattaggataatattgaataagatagatgaggtatttgtttttatgattataatttggggggaggggtatttagagtagataataagttaaaaaaaaacggatttatatgatgataagagttattattttgtgttaagattgttgtgataaaatttatttgggtatatagtagaaaatgtttttatagatgaaaagaaaaatttttaaatttatatggggttgggggagaggtagttaaatgggaattagtgttagggaaggtttttgtaaggaggtggtattttgaggtatttagtgtaattttgagttatttataggaagttttggggaaaagagttttaggtagagagaatagtgtgtttaaatatttttaggagggaatgaatttggttagttggttggatatagcgagcgaggggttgggtaggagaagtgagtaagggtttgagtttggatattaagttaaggagttggagttttatttgagtgttatgagttgttgttggaaggtttattncggtgtttttattaaattntangtagatgggtaagtagattatagtggtaatttttgttttattgaaagaatattgaatttaaggagtttggttaggtatattagataatttaagattttggagagttttggaaaagagtttttagatgtttagggattaaaaaatagtagagaatagaaagttatttatatttttgttatttagaaatagttattatgaaatagtggtttgtttttttttagtttgttttttatatagtagaaagtatattgtaaaattaattttgtatgagtaatattatattatatatcgtttttttttattttaaaggatgatttaattatattttgttgtgtggttttgttataagttatttaataattattttatggttggatatttagattattgttagatgtttttgaatattatgaatatttttttgatttagagtttttgtgttttttttattttttttttttttttaatttttttatttttttttttaaacggaaataaaagttgtgttttttaattaattagaaaagtttgtgatgtttttgaagtatttttttacgtgtatttttttagattagtagaaattgaagtgtttagtatttttgtttattattagagggttaattattattgtaagatttagaaattttgattttaggggtattttttttaaattgttaaattttaagttttatgtaatttttggttttggagtaggtaatttgtttttagatttgaaaaaattaattttgaaataatttgtattttaaaatttttttttattttttggtttttatataatgtttaaaaatgggaatgtataaattttttttttataaaatatttaaagaaataacggaattaatgatttaatattaaaataaatgtttttttgttatgaattttattaatatttaattatgattttatttagattagaagggagagtttttttttttttatgtaaaagtatatttttgtggaatataaatatttatttagagagttagtaagataaataatgaaaagattgaattattaaataattttatattttaggttaatattgtaattttttttggaattttaataaaaggtagagtatttttattttttaaaattaattgaagtagagttatgtaaagataaaagatttattttagatttaagataatttgtgtgaatatatttgtaaaatagaaaattatttttttttgttatattatttgttaaaattaatttattaatataattattatatgtaaataaattataattttagatattttaatttgattaaaattagtagtttatgtattttttatttttttttaataaaaaaataattattttaagaaaatatttttgaattattgttgtttttttttaattgtaagtttgttgaggtggttggtatatgagtgttatttgggttatattggaaaggttttagagtagtatgtgttttgagtagtttggttttgaaggttggtagaaatgtagattaatagtaatgatgttgtggtaaaatttggatatgtttatgtatttaatattttatttaggagtatattatttttaagataattaattttggtagataataaataaggtgttaattaatggatgttgtatttttttggtaggaggttagttgatatttaagatttggaagttaggttttatttgagttttatggtattttttgtagttataggagaagtaaagtgttgataaaggaagatggtttttattgtgaatatagattagtcgtaggtgggaagaagttgagagttggttgttgattagataggggatggtgaattagtgatggagatggggtttggagataggttatagagtcgttttatgtttttgtttataagttgtattgtttttatttttttttttattttttattttatgaaaagaagatgttatttagatgtttttgaagatgagaaatttttaaagaagagttttttttttaaagttttataaggaaagaggaaaagaggttgtagttattttgggggtttagtagatggtttagtaaaaaagaaagtggttaaggtgattgttaaatttgaaaattttaaggttataaaggatgaagtttttagcgatggggatgattttaggtgagatgtttgtaaagttttgtttcgggttttgattttttttattagagaattgtgaataatgaaaatttttatttttatttgttattggggtttatggaagattggatttttaaatttttttaggtataatttagatcggtaagagttggaaattttttagataagaatagtgatagtatgtagtaagtgatttatttatgtttttatagttggatagtggtaaaagtaggagaatttaggttttttgatttttggtttagtgttttttttattatataaaaatattagatgtatataaaatatttatttgttattttagttttattttatattattgtttttaagtacgttttttttcggtttatttgagttttttattatttattgaatatatttttttattttttatatttgtattgtgtttatggtattttttttatttggagtgtttgttggtttttattttgaagatgtagatttgaaattatttattttagaggttttattgatttttttttttttttttttttgattttttgtagcgtttttagggagtgtgatatgtttgttagttattgttattatgttatatatttaggtttattattttgtgattttttagagggttggaattatgtggggtttttttttatatgttttgtagtatttattgtaggtttttttatttggtagaaattgaataagtatttttgtaatgaatgagtatttatattaatatgttgtgaatagtgattatgagtttagggaatatttgattttttgttttttaagaaagttgaggggtggggagaagaggaagaatagagggatagttttttatttgttttataaataaatttttattgttagtattagtttttttagtagtttttagttttgggatgggagagtagtttagtagagggtataggaagggatacgggatagtatgatgatttttcgttatgatttattttttttttttttttttagattttttttttcgtttcgtttcgtttcgtttttatttcggtttcgtttttaatggagtttcgttttgttgtttaggttggagtttagtgatgtaattttggtttattgtaattttcgttttttaggtttaagtgagttttttgagtagttgggattgtaggtgtttattattacgtttagttaatttttgtatttttagtagaaatagggttttattatgttggtgtcgaatttttgattttaggtgatttgttttgtttagttttttaaagtgttgggtttataggcgtgagttattgcgtttggttttttttagatttttttgaagaatatttttgaatttattgttttttagttgtttttttttattagttgaattttatttttagagatatatatatagagataggttacgatattgttaaggaaagttttgggttttttttttttttttttttgagtattgattgtggttatttttgttatgtttattttaaggggaaatttttattgttggtgttttgagagaaagtggtattttaaaaaaagagtgtattattagagtttaagattgatgattggttattttaaatgtttatattaaaattttagataatatttttatttggtattaagtgttaaagtttatataagttaaaagtaattggatattttagatatattttatatatgaatttgtagaaatatattacgtattagtaagtatttagttttgagttattgtttagttagttatttatttatgttattatttatttagttagttagttgtttatgttttttgttatttatgatttatttatgtgtagttatatttttgtttgaagttagaatgttatgaattttagtttttttatattatattttttaaagatggaaaagaagtttgagtaggtttatagtaggatatataaatggagattttattttgttttttttggtttttaattgtatatatattatatagatattatagttttggaatttattattattttggtgttttttaatttttttttgttatgtttaggtatagttatgtttttttttatacgatttagattgtaggttttttaatagtatatttggtagtaattagatagatgattagagtatattttgatgagatttggaatatatgttgatggaggaagtgaggtttagagtttattaattatttttaaatagttgtaatagatttttaataaataggaggggttttaaaaattttatttagtttgaatggaatattaggatgtttgagttttttttatttttttttttgtggtttttatatagg

SEQ ID NO: 102 - DNA, 7456 bp, Artificial Sequence
  chemically treated genomic DNA (Homo sapiens)
  unsure (4456, 4459, 4478): n is a or g or c or t
tttgtgtaaagattataggaaggaagatgaagaagatttagatattttagtgttttatttaagttaaatggaatttttaaaattttttttatttattgagaatttgttgtaattatttaaagatgattagtaagttttgagttttattttttttattaatatgtgttttaaattttattaagatgtgttttgattatttgtttaattattattagatgtgttgttaaaaaatttataatttagatcgtgtgaaagaaaatatagttgtgtttggatatgataaggaaaaattagaagatattaaaataataatgagttttagaattgtgatatttgtgtgatatatgtgtagttggaggttagaaagaatagaataaaatttttatttatatattttattataagtttatttagattttttttttatttttaagaaatatgatgtaaggagattgaaatttatagtattttaattttaagtagggatgtaattatatataggtgagttataaataataagagatatagatagttagttagttaagtagataataatatagataagtagttggttaaataatggtttaaggttaagtatttgttgatacgtaatatatttttgtaaatttatatataaaatgtgtttagagtatttagttatttttaatttgtgtaaattttggtatttggtattaagtgagaatattatttaggattttggtataaatatttaaaataattaattattaattttgagttttaataatatattttttttttagagtattatttttttttaaaatattagtaataaaaatttttttttagaatgaatatagtagaaatgattatagttaatgtttaggggagagggaaagggggatttagagttttttttggtagtatcgtggtttatttttatgtatatgtttttggagatagaatttaattagtgaggggaggtaattggaaagtagtaagtttagaggtattttttagaaaagtttagggaaggttaggcgtaatggtttacgtttgtaagtttagtattttgggaggttgagtagggtagattatttgaggttaggagttcgatattaatatggtggaattttgtttttattaaaaatataaaaattagttgggcgtggtggtgggtatttatagttttagttatttaggaggtttatttgaatttgggaggcggaggttgtagtgagttaagattgtattattagattttagtttgggtaatagagcgagattttattaaggacgggatcgggatggggacgggacggggcgggacgggaagggaagtttagagaaaaggagaagagatggattatggcggaaaattattatgttgtttcgtgtttttttttgtgttttttattggattatttttttattttaggattagaggttgttggaaaagttgatattggtagtgaggatttgtttatgaagtaaatgaaaaattatttttttgtttttttttttttttttattttttaatttttttaggaggtagaaaattaagtgttttttgggtttataattattgtttataatatattaatataaatgtttatttattgtaaaaatatttgtttagtttttgttaaataaaagggtttgtaatggatgttatagggtatatgaaaaggaattttatatggttttagttttttgagaggttatagggtagtaagtttgggtatgtggtatggtaataataattggtagatatattatattttttagaagcgttataggaagttagaggagagaagggggaagaattagtgaagtttttggagtaggtggttttagatttgtatttttaagatggaagttagtaagtattttaggtagagggaatattatgagtataatgtaggtgtagaaagtaggagaatgtgtttagtgaatgatgagaagtttaggtgggtcggagaagagcgtgtttgaggatagtagtatgagataaagttggaatggtaggtaaatattttgtatatatttaatatttttgtgtagtagaaagagtattggattaggagttagaagatttgggtttttttgtttttgttattgtttagttgtggaagtatgaataaattatttattgtatgttgttattgtttttatttgaaaagtttttagtttttatcggtttgagttgtatttagaagaatttaaagatttaattttttatggattttagtgataagtaagaatagaggtttttattatttataattttttgatgagaaaaattaagattcgagataaagttttgtagatattttatttgaggttatttttatcgttgagggttttattttttataattttgaggtttttagatttaatagttattttggttatttttttttttgttggattatttgttgaatttttaggatgattgtagtttttttttttttttttttgtgaaattttggagagaaggtttttttttgggggttttttatttttaaaggtatttaggtgatattttttttttataaggtgaggggtggaaggaaaggtggaggtagtgtagtttatgggtaggggtataaaacggttttatgatttgtttttaaattttatttttattattggtttattattttttgtttggttagtaattagtttttagtttttttttatttgcggttagtttatatttatagtaaaaattatttttttttattagtattttattttttttatgattatagaaaatattataggatttaaataaaatttaatttttagattttaaatgttagttaattttttgttaggaaaatataatatttattaattagtattttatttattatttgttaaaattaattgttttagggataatgtatttttaagtaaaatgttaagtatataaatatgtttaagttttattataatattattattattaatttatatttttgttaatttttaagattaaattgtttaaaatatatattgttttgaaatttttttaatgtaatttaaatggtatttatatattaattattttagtaaatttatagttggaaaaagatagtaataatttaaaagtatttttttaaagtaattatttttttgttaaagggaaataaaaaatgtataagttgttggttttagttaaattggggtatttaaaattatggtttatttatatataataattatattaatagattagttttaataaataatatggtagggaaggatagttttttattttgtaaatatatttatataaattattttgaatttgaaataaattttttgtttttgtatgattttgttttaattaattttagaaaataaaaatattttattttttattgaggttttaaaagggattgtaatattaatttaaaatataaaattatttaataatttagtttttttattgtttgttttgttgattttttggatgggtatttatattttataagaatatatttttgtatgagggaaaaaagatttttttttttgatttaaatgaaattatgattaaatgttaataaaatttataataaaggagtatttattttaatgttagattattgatttcgttgtttttttaaatgttttataaaaaaggaatttatgtatttttatttttaaatattgtatggaaattaaaaaataaggaaaaattttgaagtataaattattttaaaattaatttttttaaatttgagaatagattgtttattttaaggttagaggttgtataaagtttaagatttgatagtttgaggagggtgtttttaaaattaagatttttggattttataatggtagttagttttttaataataggtaaagatgttaaatattttaatttttattaatttaaaaaaatgtacgtaggaggatattttagaggtattataaatttttttagttggttaaaaagtatagtttttattttcgtttgaagagaaaggtagaggagttaaaagggaaagggggataaaggaaatataaaaattttgaattaaaaggatgtttatagtatttaaaagtatttaataataatttgaatgtttaattatgagataattgttaagtaatttatggtagagttatataataaaatataattgagttattttttaagataaagaaaaacgatatatgatgtaatgttatttatgtaaagttgattttatagtatgttttttgttatataaaaaatagattagaaggaaatagattattattttatggtggttatttttggatggtagaaatatgggtgattttttgttttttgttattttttggtttttaagtatttagagatttttttttaggattttttaaaattttgagttatttaatatgtttaattagattttttgagtttagtgtttttttagtagggtaggaattattattgtggtttgtttgtttatttatntgngatttaataagaatatcgnagtaaattttttagtagtaatttatagtatttagataaaattttaattttttagtttggtatttaagtttaggtttttgtttattttttttatttagtttttcgttcgttgtgtttagttaattggttaagtttatttttttttaagagtgtttaaatatattgttttttttgtttagaatttttttttttagaattttttatgaatggtttaaaattatattaaatgttttaaaatgttatttttttataaaggttttttttgatattgatttttatttagttgttttttttttagttttatataagtttgagggtttttttttttatttatagaagtattttttgttatgtatttaaataagttttattatagtagttttagtatagggtgatagtttttattattatgtgaattcgtttttttttaatttgttatttgttttaagtatttttttttttagattataattatgagagtaggtgttttatttgttttgtttaatattattttagtatttggaatagtgtgtgaaaatagtaggcgtttaataaatagttgttgaaggaattaatggatattattgaaggtgttaatatagagaagaaatgaaaagaaattagaggtgttttagtaatataaaggaaattatgtggaagtttgttttttttttttttatttgttaaaagtagttaagtattatttttatttgtatgtataggggtgttattaaaatttatattattatagtgttagtaattatattgatagttattaaattattgttatttgtagtttaaattatatttgttaagtttatgtttttttataaaattattaaattataataaaggttgtaattttgtagattttggaagttgttttgggaattgattgttagtttttttggttagtagaataaatttgggtgtatttttattttcgtttaggttgaatgatattagttagtttaattaatttatttaatatgggtaaagttaaagtttttggttttatatgttattttattgaaaatttatagttatttcgtaaggtagttattatattttatagaggaaatttagaagggttaaaatatttgtttaaaataatttatttaagtgtataaaattaagaattgaagttttattaagttggaatcgaggtgaagtgttgagttgggaagaatataggtagtatttttattagattaaaatcgtaaatttttaattgttatatatttaaattatattttgattagaatatcggtttttttttgtgattttttgttaaaatattaattattttttaaattatagattaaattattttagagagcgtttttcgattacgttagttaaatttgattaattttttggaagttataaagttttgtatttttttttataatatttagtatattttgttttgaatgttttatatgtaaatgttatgttaatattattttatgattttttaagatatgtttattttttatgttattttatttatgtatagtatatagtagatatttaaaagatgttatttgaatgagtaaatgagtgaataaaatggaattcgtaatattatatatgaggtaaattattttttaagtttacgaattattattattttattattttttaatggatgatgaatttataatcggtatagaaatagaatttagtgtgatagtttttgtcggttatttagtttaatttatttagtttttttaggagatttagaaattttttttatagtttgtattttgtaattatttaaaatatttattagtcgggcgtagtggtttatgtttgtaattttaatatttcgggaggtcgaggtaaacggattatttgaggttaggagtttgagattagtttggttaatatggcgaaattttatttatataaaaatataaaaattagtcggatatggtgttaggtatttgtaatattagttattcgggaggttgaggtaggagaattatttgaatttaggaggcggaggttacgttattgtattttagttttagcgatagagtgagatattgtttcgaaaaaaataaaaaataaataaaatatttatttagtatttagttttattaatttacgggttttgtatttatagatttaattaattatagatgaatatatttcgggaaaaaaaatataaatttaaaaaatatagtatgataattatttttatagtatttatattgtattaggtattattagtgatttagagatgatttaaagtatgtcggaggatgtgtataggttatatggaaatattaggttatttgatataaggtatttgagtattataggttttagtattcgcggggtatttgggaaggattattttagtttgtttaaggaatgtttaatttgagttttgaagaaatagaaaaaattagttttggtaaaagttatggggggtttattttaggtagaaggaatattaaaggaaaagatttaaggaataatttggtatatttgaggaagagaaaggaggttaataaggagggtatttggtaaggaaataagtggtaagagaaataggagaggtagtaagagttaaaatatgtagtattttgtaggttaggataaaataattggattttaagttaagagtaatggaaaattaaggggagtttaaagtaggagtagggtatgattttttttttttttaagattatttgggttgttggatgtagagttgggaggttagtaaagaggaaattgtagttatttaattgaaaggtgatgatgatttggataggggttgtggttatggaaatgaagagaagtggataaatttgaaatatatttttgaggttgaattgattggatttgttgacggattggatgtgtggatataagaaaaaggtgggttttgttttataataagtattgagattggaaaaacggaggaaagtatagatttaaagaggaaaattatgagttttgtattgt

SEQ ID NO: 103 - DNA, 5562 bp, Artificial Sequence
  chemically treated genomic DNA (Homo sapiens)
tttttatgttttcgtgaaatggttttttttagtttttttaatttttcgttaattttcgtttatttcgtagttttttttaatgaatttcggttttagtaataggtattttttttttttagattttgttatggttattttttagattttttaacgagggttttttgttgttttttttggttatttttaggttttgtttaaggtgggtttttttagttttttcggttttttttttttttattatgtggtggtttttttttatttaatttataggttttttttttattttatcgaggggttttttagttttttttttttttttttcgagggtgcgtttttttttttatgtcgggatgggggttttttttaagttttttaggtttttttttaatttattaacgttggttgggtgattttcgattttattttttttttatagtttttttcgattagtgttttttttttgtatttaaagtcgtttttatttttttattaggttttattatttttttttttgtgattgaaagttttttttagttttgtataaatatttttgttttttattggttttttttattgtttttttttttttttattattttttaggtttggggtggttttttttatttaatttatgtttatttttttttttttattttattttttgagataggtttttttttgttgtttaggttggagtgtagcggtgtgtatttagttcgttgtagtttcgattttttaagtttaagtgatttttttgttttagttttttaagtggttgggattataggtatgtgttattatgcgtaattatttttttttttttttttttgtagagatggatttttttttgttgtttaggttggttttaaatttttgggtttaaacgatttttttattttaattttttaaagtgttgggattataggcgtgaattatcgtgttcggttttttttttattttatttatttatatttttttttttttgtttttgttttttttttttacgatgatttgtttagttaggtacggtagtttatgtttgtaattttagtattttgggaggtcgaggcgggagaattatttgaggttaggagttagagattagtttggttaatatggcgaaatttcgtttttattaaaaaatataaaaattagttaggtgtggtggtacgtatttgtaattttagttattcgggaggttgaggtaggagaatcgtttgaatttgggaagtggaggttgtagtgagtagagatcgcgttattgtattttattttgggtgatagagcgagattttgttttaaaaaagaaaaaaaatgatttgttttatattttaaggttattatttattttttgtttggggtgattttttttttgttttttttattattttaatattttattattattttttttttttcggttaggaatgattttttttttgattatatttatatttttttattttagtttagttttttttttttttatttattttttattatttttattttttgttagttagatttttttttttttattatttttttgttttttatagtgtttttttttattttttttttgtttaagaaagtttattaatttttattttttttatattttttttttttttaggatagtgttatttttagaattttgtgataataatgatttttattatattatttatttttgttttttttattttatgatggttttttttttttttttgttttttattgatttttttttacgttttcgttttgagaattatgatgatttttttttagtatggtagttttttttattttgaaggtatattttatttttttattaggttttaggttatatttttttatttgaagtagttttttcgattaggagtatatatgtgtttttgttattgttgtaggtttttatttggttatggtatttgtttttcgtcgtcgtatatatttcgtagtgtagtgggtattttgtagtgtagatagagggcgaggttgtagttatgggtggtgtggttttcggattacgattttgatttaggatttttgtgttttgagagaggagggattagtagttttttggttttttatgggcgggatgttgattattgtttaaggaattgtttagagttggacgaagaagtagtggtgatgttagtaaagttgtttttaggggcgggaagcgattttattatgaagtttgtttgtttaattatatggttggggattttggatgttagggttcgttgagaaagtttaggggtagggaggggtcgtgatggaggtttttatggatttttgtgaaattttaggtttagttggtttttgaatgtgggatttttttttttgaaggtgttatgtaggttttgtagatagtaggagtttaggtagggggttttgaggttagggtttgtattttaggttaaggagggagagtgaggattaggagggtagaggatttgaattttttggttttgagagaggggatagttaggggtttagaaatttgggttttggggaaagtgaggtttatttggatttttgtgtgtaggggaggagggggttggggtttgaattttttagtttaaggagaaaggaaatttttttattttttttaaaaaaatatattatatgatattaatgtattttttttgagatggagttttgttttgttatttaggttggggagtgtagtggtacgattttggtttattgtaatttttgttttttagttttaagtaatttttttattttagttttttaagtagttaggattataggcgtttattattaagtttagttaattttttttgtatttttagtaaagacggggttttattatgttggttaggttggttttgaatttttgattttaagtgatttatttgtttcggttttttaaagtgttggggttataggtatgagttatcgtatttggttttttttttttttttttttttttaattatatttttaaagatttttttttttagttatgtttttatttgattttttagaattgagatgtgtttgggattttttttggaggatggaggatttagagtttattaagttttttttttagggatttaattataggagttttttttttttgggatttttaggttttttttttttttatttttggttttttttatgaatttgaatttttagaatgttttttcgtttattttgaggatttgttgaaggttttttttttttttatattttttttttttttaatttgggatttttttttttttgaggttttagagatagtttaggttttttgttatttattaagatttaggagggtgtagagtaatataaaggttagtagaaaggtttttggttttttggagagttttatggtgtgtgtattagtagtatttggtttttagtttttataggaagttgaggaggggtgggtttggatttatatttattttacggggagaaatagttgaggttagaatttagggtagttttttgtggttttcgggttgggaaggtagaattagaatttaaaagtgatttgggtattttgtgtttagttttttatttttatggagattttaggagtttgggtttttattttttttttttattagaatttagaaagttattattttgtttttttatttttttacggtttattgttgtttgtttgtttgtttgaagattaagacggagttgggttttttgatttttagtggttgtaagaattgggattttttttttttttttttttttttttttttttttaaggaagtatttagtgtgggtagggttttattttggagtatttagtatgtttaggttggttttgcgggtgcggggtgttttgtttttttttttttttttttatgtgttcggtttatattttttgtgtgtttgggttgtttttagttgcgattttatttagggttgtatttttgggtttttaaggtatcgaatgaatagagggatgtttgtcggtagttataggcgggcgtagtaaaagatagatgtttatagtttatatattgggaaattgaggtttttgtggaagaattttaggataggggtgtgtgtgtgtgtgtgtggtgggggttgggtatatgttttgtgttatatttaggacgtagaattttttttttttggttttaggtataaggttgaaagagatttgttaatttttttcgcgcgtgcgcgcgcgcgtatgtatgtatatgtgcgtgtgtgtgtgtgtggtaaggggatagagagaagagtgtagtcgtttgagttatttgaagagattttgttgcgtagaatttaggttttttacgaaattacgaaaatttatttagatttgttgttttagtttagcgtagtcgtttacgtttgtagttttagtattttgagaggtcgaggtaggtggatcgtttgagttgaggagttcgagattagtttgggtaatatggtaagattcgtcgtttttttattttatgtttttataaaaaatataaaaattagtcgaatgtggtggcgcgtgcgtgtaattttagttatttaggaggttgaagtgggaggattttttggttttaggagataggggttgtagaaagtcgagatcgtgttattgtattttattttgggtgagagagtaagattttgttttaataaaaaatttttaaaaaataaaataaataataatatagtaaaaagatttgttttttcggttttagtgtgggcggtaattttatcgtgtaatgagaaaggcgaattttttttagatattaatttcggaggtcgtttttgttgttaggtttttagaaagtagggttcggacgttattgggaggcgaggttagagcggggttgtgtgtggcggagggaggcggggttggaggaaacgttcgttgttaaggaacgtagcgtttttttcgttttggagaggcgcgattgggtttgcgtagtgtcgacgtcggcgtcggcgcgtcggggtttgaaaggttcgagtttcgcgcgtttgcgtattttagttagcgtagggcgtatttcgtttttttttattttttttgtttttcggattttatattttattttatttttttggttaggcgaagtttacgacgttgatatgtcggagattcgttttcgttatgtcgtgttttgtagtagttaggattcggtgagggatttgtatgggggaggttggaagacgtgagggaattaatgaggatagtttttaaaagagtttttggggtttttttggaagtttaaggagagttatggggggatttttaggaggttaaaagtgaattgtggagagatgttgaattagggacgtttcggcgtttagggaattttcggagagaaaaggaggaatagggaagtttttttggagagtttataggtgaatttttacgggaaagtgttgtaggggaaattttaggtagagtgtcgggggattaacgggagagtttaaatttgggggtcgtagaggttttgggaggatttaaaggaattatttgagagttggaggtttagttgttatttttgtgttttaattttttttttttattgttgtttttaga

SEQ ID NO: 104 - DNA, 5562 bp, Artificial Sequence
  chemically treated genomic DNA (Homo sapiens)
tttggaaataatagtgggagaggagaattagggtatagagatgatagttaggtttttagtttttagatgatttttttgagtttttttaaggtttttacgatttttagatttaagttttttcgttaatttttcgatattttgtttggagttttttttataatattttttcgtggaagtttatttatgggttttttaagaaagtttttttattttttttttttttttcggaagttttttagacgtcggaacgtttttaatttaatatttttttataatttatttttagttttttggaaatttttttatgattttttttagatttttaagagaattttaaaagtttttttaagagttatttttattaatttttttacgttttttaattttttttatgtaggttttttatcgagttttggttgttgtaggatacgatatggcggaggcggattttcggtatgttaacgtcgtgggtttcgtttggttagaaggatgaggtagagtatggggttcgaggggtagggagagtgggagggggcggggtgcgttttgcgttggttaaagtgcgtaagcgcgcgaggttcgggttttttaaatttcggcgcgtcggcgtcggcgtcgatattgcgtaagtttagtcgcgtttttttagagcgggaagagcgttgcgttttttagtaacgagcgttttttttagtttcgttttttttcgttatatataatttcgttttagtttcgttttttaatgacgttcgaattttgttttttgggagtttagtaatagaagcgattttcgggattggtgtttggaagaaattcgttttttttattgtacgatggagttatcgtttatattgaagtcgagaaagtaaatttttttgttgtattattatttattttattttttaaaaattttttgttgagatagggttttgtttttttatttaggatggagtgtagtggtacgatttcggttttttgtaatttttgttttttggggttaagggatttttttattttagttttttaagtagttgggattatacgtacgcgttattatattcggttaatttttgtattttttgtggagatatggggtgagagggcggcgggttttgttatgttgtttagattggtttcgaattttttagtttaagcgatttatttgtttcggttttttaaagtgttggaattataggcgtgagcgattgcgttgggttaggatagtaaatttgagtgaattttcgtagtttcgtagggaatttggattttacgtaataggatttttttaaatggtttaggcggttgtatttttttttttgtttttttgttatatatatatatacgtatatatatatatatacgcgcgcgcgtacgcgcgaaaaaaattagtagattttttttagttttatgtttgaggttaaaagagaagggttttgcgttttaaatataatataaagtatgtgtttaatttttattatatatatatatatatatttttattttggagtttttttataaaagttttagttttttaatatgtggattgtgggtatttgttttttattacgttcgtttatgattgtcgatagatatttttttgtttattcggtgttttggagatttaagggtgtagttttgggtggggtcgtagttggagatagtttaaatatataaggagtgtgagtcgagtatatgaagagaggggaagggagataaggtatttcgtattcgtaggattagtttggatatgttgggtgttttaaggtggggttttatttatattgggtgtttttttgggaggagaggggaagagagagaaggagagggaattttagtttttgtagttattgggaattaagaggtttaatttcgttttggtttttaagtaaataaataaataataatgggtcgtgggaaggtgagaaaatagggtggtgattttttgggttttaatagaagagggggatggaagtttagatttttggggtttttatggaggtggggggttgggtataagatgtttaggttatttttggattttggttttgtttttttaattcggaggttatagaggattgttttgggttttgattttagttattttttttcgtagggtgaatgtgggtttagatttatttttttttagttttttataaaagttggggattaggtattgttgatatatatattatgaggttttttaggagattagagatttttttgttggtttttgtgttgttttgtatttttttgggttttggtaagtgataagggatttgaattgtttttgggattttaggaagagagaggttttagattgagagagagagagatatagagagagaaagagtttttagtaagtttttaaggtgaacggggaggtattttggaaatttagatttatggaagaggttaagggtaaaggaagagaaagtttgggggttttagagaagaaaagtttttgtgattggatttttgagagaggggtttggtgggttttgaattttttattttttaggaaggattttaaatatattttaattttaggaaattagatgagagtatggttggaaagggaaatttttaaaaatataattaaaaaaaaaaaaagagggagaaggttaggtgcggtggtttatgtttgtaattttagtattttaagaggtcgaggtaggtggattatttgaggttaggagtttaagattagtttggttaatatggtgaaatttcgtttttattaaaaatataaaaaaagttagttgagtttggtggtgggcgtttgtaattttagttatttgggaggttgaggtgagaggattgtttgaaattgggaggtaaaggttgtagtgagttaagatcgtgttattgtattttttagtttgggtgatagagtaaaattttattttaaaaaaaatatattaatattatatgatatatttttttaaaagaggtagagagattttttttttttttagattaagaagtttaggttttagttttttttttttttgtatataggagtttaagtaagttttattttttttaggatttaggtttttgggtttttagttgtttttttttttagaattaagaagtttaagttttttgtttttttggtttttattttttttttttgatttgggatgtagattttagttttagggttttttgtttgagtttttgttgtttataagatttatatggtatttttaaggaggagaattttatatttaagaattagttggatttgaagttttataaaagtttatggaaatttttattacgatttttttttgtttttgagtttttttagcggattttggtatttaaaatttttagttatgtaattaggtaaataggttttatggtggagtcgtttttcgtttttggaagtagttttgttggtattattattgttttttcgtttaattttggatagttttttgggtagtggttaatatttcgtttatgaaaaattagggagttgttggtttttttttttttaggatataaaagttttaagttaaagtcgtggttcgaagattatattatttatgattatagtttcgttttttgtttatattgtagggtgtttattatattgcgaaatatgtacggcggcggggagtaggtgttatggttaaatgaagatttgtagtagtgataaggatatatgtgtgtttttggtcgggaaggttattttaagtaagaggatgtggtttgggatttggtggggaggtggggtgtatttttagggtggaagagattattatgttgaggggggattattatggtttttaagacgggagcgtgggaagaaattagtggagagtaggaaagagggaaagattattatgagatggagggaatagaaataagtggtgtgatagaaattattattgttatagaattttgaaaatgatattgttttaaagagaaggaaaatgtgggaggggtgagagttaatagatttttttaggtagaagaggggtaaggaaagatattgtggggggtagagaaatagtgagaggggaagaatttaattggtaggaggtggaaatggtggggagtggatagagaaggaagaggttgggttggggtgggaaagtgtaagtgtaattagggaagaggttatttttgatcgagggaggagagatgatggtggagtgttggagtggtggaagagatagaaaagggattattttaaataggagatggatgataattttgaagtatggagtaaattatttttttttttttttgagatagagtttcgttttgttatttaggatggagtgtaatggcgcgatttttgtttattgtaatttttattttttaggtttaagcgatttttttgttttagtttttcgagtagttggaattataggtgcgtgttattatatttggttaatttttgtattttttagtagagacggggtttcgttatgttggttaggttggtttttaatttttgattttaagtgattttttcgtttcgattttttaaagtgttgggattataggtatgagttatcgtgtttggttgagtaaattatcgtaaagaggagaagtagagatagggagggggagatgtggatgagtaaaatgaaagggaggtcgggtacggtggtttacgtttgtaattttagtattttgggaggttgaggtgggaggatcgtttgagtttaggagtttgagattagtttggataataaaaagagatttatttttatagaaaaaaaaaaaaaaaaatagttgcgtatggtggtatatgtttgtagttttagttatttgggaggttgaggtaggaggattatttgagtttaggagatcgaggttgtagcgagttaagtgtatatcgttgtattttagtttgggtaatagagggaaatttgttttagaaaataaaatggaagagagaagatgggtatgagttaaatgaaagagattattttagatttgaaaaatgatggaggagaaagggagtaatggaagagattagtgggggatagagatgtttatataaagttgaaagagatttttaattataggaggagagatgatgaggtttggtgagggaataaaggcgattttgggtgtagggagaaaatattggtcgggagaggttgtgaaaggaaagtgagatcgaaaattatttagttagcgttggtgggttaaggaaggatttgaaaggtttgaagagaatttttatttcggtatagaagaggaaacgtattttcgggaagggaggagagagagttgggggatttttcgatggagtgaagggggaatttgtgaattgggtaggaagagattattatatggtggggagggggaaggtcggggagattggaagaatttattttaaataagatttgaaaatagttaagaggggtagtaagagattttcgttgggaggtttgaggagtgattatggtaggatttgagagaggaggatgtttgttgttgggatcggggtttattggaagagattacggggtgggcgggggttggcggggagttgaggaggttggaagagattattttacgaaggtatggggg

SEQ ID NO: 105 - DNA, 5360 bp, Artificial Sequence
  chemically treated genomic DNA (Homo sapiens)
aagattagtttggataatatggtgaaatttggttgttattaaaaatataaaaattagttaggcgtggtgttgtacgattgttgttttagttattcgggaggttgaggtaaaagaattttttgaattcgggaggtggaggttgtatcgcgttattgtattttagtttgggcgatagagcgaaattttgttttaatttaaaaaaaaaaaagtttttttatggtagggttatttttttttttgtaattaataagtattttgtagggagatattttaggttatagtttgtttttaattatatttttatttagtaattttagtattaattgattatttttaatttttttttttaaattattattgtggtaatttgtttttttttttttttttttttttttttttttagatagttttattttgttattaggttggagtgtagtggcgttataggtatgagttattgtgttcggtttattgtggtaatttttaaatattttaattttaggtttaggggtacgtgtgtaggtttgttatataggtaaatttatgttatgggggtttgttgtaggaattatttcgttatttaggtattaagtttagtatttagtagttattttttttgtttttttttttttttttattttttagtttgaagtaggttttagtgtgtgttgttttttttttttcgtgtatgagtttttattatttagtttttaattataagtgataatatgtggtatttggttttttgtttttgcgtttttttgttaaggatagtggtttttagtttcgtttatgtttttgtaaaggatatgattttgtttttgttttgttttttttttttttgagatagagttttattttgttgtgtaggttggagtgtaatggtatgattttagtttattgtaatttttatttttttgtttaagtaatttttttgttttagtttttcgagtagttggtattatagttatgtattattatattcggttaatttttatatttttagtagaggtaggattttgttatgtttgttaggttagttttaaatttttgattttaggtgatttattagttttagttttttaaagtgttgggattataggcgtaagttattgatgattttttttttaggaggtaaaatattatgtgtttttaaaagttagagttggttagttatggtggtttatatttgtaattttggtattttggggatggcgaggttggtggattatttgaggttatgagttttagattaatttgattaatatggtgaaattttatttttattaaaaatataattagttaggcgtggtggtaggtgtttgtaattttagttattgaggaggttgaggtatgagaattatttgaatttagagatagaggttgtagtgagttaggattttgttattgtattttagtttgggtgatagaataagattttgttttagaaaaaaaagaaaaaaaaaattggagttattaaaaaaagttatatatagggaagtgttttttattttattttttttattttatttttattttttattttttttaatttatttttatttatttttcgtagataaagaattttttttgttttttatgtattttttttgtgtttttttttatttaaatgagtagagatatgtgtatttttttttttttttttttttgttataagaaagttagtaaattgtagatatttttttttttttgttttttttatttaatattatattttggaaattattttttatagatgtatagagattttggttattttttgttgtagttgtatagtgttttattttgtggtagtgtcgtattgtttttaattatttttttatgtataaatatttaggttatttttaagattttgtaattataaattatgttgtaatatgttttttttgtatatacgtttttgtaatgttggaagtatgattttaagttaaatttttagaagtaggattgttgagtgaaaaagttaataaatgcgttattttgttagatagtgttaaaatcggttaggtgtagtggtttatgtttgtaattttagtattttaggaggtaggaggattatttgagtttaggagttgtaaattagtttaggtaatatggcgaaattttatttttattaattaaaaaaaaaaaaaaaaagatattgttaaatttttttttaaaaagatcgtatgtttttatgtttattagtagtttgtgagagcgttttaagtatttttttaaacgagaagtgatgttttcggagtattaaaattgaagtgattttaaaattatgttgtatttatacgaataggtgtgtatttaatggattaaattagtttagttgatatgttttttttattaggaatagtgtggagattgaaaaattaatttagtttagagtagttatttaattgtaaagtttttttttttaaatattgatttattatgtgaggaaatatttattttgtatagaagtgtgtggaattggacgagggggttgatttatatatgtggtttggtatatatatatttttattatagagggtgtaatgaagatataggtggtttagtattataggaaagggaaaaaagaaaaaaaaaagacggtagaggtggttttttaagtatttatttttattttttttgttaatgatttataatttgttgttattgttgttatttattgttttttatatttttttataaggtttgtgtgttttgaaaaaatatgtttttatttcggatagaagtggggtatatagggttaggcgcggtggtttacgtttgtaattttagtattttgggaggtcgaggtaggtagattataaggttaggagttcgagattagtttggttaatatggtgaaattttatttttattaaaaatataaaaattagtttggcgtggtggtacgtgtttgtagttttagatatttgggaggttgaggtagaagaattatttgaattcgggaggtagaggttgtagtgagtcgagatggtattattgtattttagtttgggcgagagtgtaatgagatttcgtttttaaaaaaaaaaaaaaaaagaaaaaaagaaaagtaagtggggtatacgatttaggtttaagttaattagattaattttatttttgatggttgttaatgttttagatacgggttcgtagttttacgtagagaagaggttaaggtagaaaatatgaatttgaggtaaaaagaaatgaggtatttgtttgttttattaagttttttaattaaattaattttgaagtttgttttatttttggatttttagtgatgttattcggtaaagtttatttgttttaggacgtaagagttgggttttttgtgatttggaattaaaattattttaatttataaaatgagtaattttaatattatttatgagaaatattttattggtatatgtttttttttagcgtttttgaaaattaaattaggtgggtgaaaagtatatttttgtatgaaatttttttattttagaaaatattttgttattttgataataatggttaatgttattatatttaaatttttgtttttttttttttttgagatagagtttcgttttgtcgtttaggtgtgatggcgcgatttcggtttattgtaatttttgtttttttggtttaagcgatttttttgttttagtttttttgagtagttgggattataggtatgcgttattatatttggttaatttttgtatttttattgtagacggggttttattattttggttaggttggtttcgaattttcgatttttagtgatttttttgtttattttaaaaagtaatttgataaatttataggttcggtatattttaaaaatttttttaaatatagtatatttttttttttttttttagaattaattatgaatcgtatatatagttagaggtttttaattcgagaacggataaaggggtttgtttgtgtaatataattatttttaatggttaaataaattaatatataagattagttttatttaatataataataacgaattaaagtttataatagataagaaaagtattagttgttttcgttatttcggagcgatttttaaggggacgcgggagagcgtcgcgggggacgcggaagtttgacgttataggaattgggggcggggcggggaggttcgtatattttattgcgtatgttttcgttttttcggtcgcggtttggcgtagtgcgtacgcgcgcgggtgggcgggtttgattggtcgtagagtttgcgtagttggtgaatggcgttggtggcgggaaagttgagttttttttgcgtcgagttttcggggcgatgtgtagtgttttttatagggttgagtttgggatcgaggtgagagtcgtcgggttgggagtgagggagatgggaataaggtcgtcggtgggcgaggggagtcgagggaattcgggggattgggaggtttggggcggcgcggtttggtcgggttgggatcggtttttcggtttagacgttcgcgatgttggtattttttgttattttttatttgggttttaggggttcgtttttgggtagtttggagtttttcgaggtgggaggatcgggcggaggtggaggaagtttttttttggaagatttgttgtttgtttagatcgatataatatacgaggtttttttttttaagagttatggtttaaaaattttttataaattaattatcgttggaaatgttaagttatgtaagaaaagttagaaaaggggaggggtcgttcgttggagtatttggagtttttttggaataggtggtgtttgcggaggttgttttatttttttgtagtttacgtgtttttgtttagggtagttggttttcgttattttttagtattcgtttttagtttaggtagttttagagttatataagtcggtggatgttttttaagaattgaattaagtgtttagtatttattgtgtgttaattacgtgttaagggataggagtaagtaataaaagatataatttttgttattaaagaattagtaagggaggttgttgtaagaattatagtattgtataaaagtttgttgtttattagaggggcgggtattatggaagatgtaggaggagatgattgaagttttaaggattatttgaaatggtttggtaaggagaggatgatatttagagcggagatagtcgggagtatatggattttgaattaagtaagagtatggttaatttagataattgtaagtatttttgtaaaattggaataaagggagtgagggataataggttgggaagtaagcgttgagtagtgggtagggtatgaaggattttttatgtagatgagagaggaagtaattttaaaagagtt

SEQ ID NO: 106 - DNA, 5360 bp, Artificial Sequence
  chemically treated genomic DNA (Homo sapiens)
gatttttttgagattgtttttttttttatttgtataaaagattttttatattttgtttattgtttagcgtttattttttaatttattgttttttattttttttgttttaattttatagaaatatttgtagttatttaaattagttatgtttttgtttaatttagaatttatgtattttcgattgttttcgttttgaatgttattttttttttgttaaattattttaaatggtttttgaaattttagttatttttttttgtattttttatgatgttcgtttttttaatggataataaatttttgtgtaatattgtaatttttatagtagttttttttattagttttttaatggtagaagttatgttttttgttgtttatttttattttttaatacgtagttgatatatagtaagtgttggatatttggtttaatttttgaggggtatttatcggtttgtgtggttttggagttatttgggttggaaacgaatattagggggtggcgagggttagttgttttaagtagagatacgtgggttatagggaggtgaggtaattttcgtaaatattatttgttttagaaaagttttaaatgttttaacgggcgatttttttttttttttagttttttttgtatagtttgatatttttaacggtagttaatttgtgaggggtttttagattataatttttgggaggagagatttcgtatgttatatcgatttgggtaggtagtaagttttttaaagaaagattttttttattttcgttcggtttttttatttcggaggattttaggttgtttaggggcggatttttggggtttaggtgagaggtggtagagggtgttagtatcgcgggcgtttaggtcgagaggtcggttttagttcggttaggtcgcgtcgttttaagttttttaatttttcgggttttttcggtttttttcgtttatcggcggttttgtttttattttttttatttttaattcggcggtttttatttcggttttagatttagttttatggaaggtattatatatcgtttcgaaggttcggcgtaggagagatttaattttttcgttattaacgttatttattaattgcgtagattttacggttagttaaattcgtttattcgcgcgcgtgcgtattgcgttaggtcgcggtcggggaggcgggagtatgcgtaatagggtgtgcgggttttttcgtttcgtttttagtttttgtgacgttagattttcgcgtttttcgcggcgttttttcgcgtttttttggagatcgtttcggggtggcggggatagttggtgttttttttgtttgttgtaaattttggttcgttattattatattaggtaaagttggttttatgtattaatttgtttaattattaaaaataattgtattgtataagtaggtttttttgttcgttttcgggttaaaagtttttggttgtgtgtgcgatttatggttaattttggaaaaaaagagaaaagtatattgtatttaaaagaatttttaaaatatatcgagtttgtggatttattaagttgttttttgaggtaggtaggaggattattggaagtcgggagttcgagattagtttggttaaaatggtgaaatttcgtttatagtaaaaatataaaaattagttaggtgtggtggcgtatgtttgtaattttagttatttagggaggttgaggtaggagaatcgtttgaattagggaggtagaggttgtagtgagtcgagatcgcgttattatatttgagcggtagagcgagattttgttttaaaaaaaaaaaaagataaaaatttggatatagtagtattggttattattattaagatgataaaatgttttttggaatgaaaaagttttatgtaaagatatattttttatttatttagtttagtttttaaaaacgttaggaaagagtatatattaatgaagtattttttatgggtaatattaaagttgtttattttgtaaattggaatggttttggttttaagttatagaaaatttaatttttacgttttgaaataaatgggttttatcgggtgatattattagaagtttaaaggtaagataggttttaaggttagtttaattgagaggtttgatgaggtaaataagtattttatttttttttattttagatttatgttttttattttggttttttttttacgtagggttgcgggttcgtatttgaaatattaataattattaggaatgaggttggtttggttagtttaggtttgaatcgtgtgttttatttatttttttttttttttttttttttttttttttggagacggagttttattgtattttcgtttaggttggagtgtagtggtattatttcggtttattgtaatttttgtttttcgggtttaagtgatttttttgttttagttttttaagtatttgggattataggtacgtgttattacgttaggttaatttttgtatttttagtagagatggggttttattatattggttaggttgatttcgaatttttgattttgtgatttgtttgtttcggttttttaaagtgttgggattataggcgtgagttatcgcgtttggttttgtgtgttttatttttattcggagtagagatatatttttttaaagtatataggttttgtggaaaggtgtggagaatagtaaatgataataataataataaattgtgaattattaataagaggagtgggagtggatgtttgggaggttatttttatcgttttttttttttttttttttttttttttatggtgttgaattatttatatttttattatattttttgtaatgaggatatgtgtatattaaattatatgtgtaggttaattttttcgtttaattttatatatttttatataaagtaaatatttttttatatagtaaattaatatttgagaaaggagattttataattaaatagttgttttaggttaaattagttttttagtttttatattgtttttaatgaagaagatatgttagttgaattagtttagtttattaagtgtatatttgttcgtgtgagtgtaatatggttttgaaattattttagttttaatgtttcggaaatattatttttcgtttaaaaggatatttgaagcgtttttataaattgttggtaggtatgaaaatatacggtttttttggaaaggaatttggtaatatttttttttttttttttttaattaatagagatggggtttcgttatgttgtttaggttggtttataatttttgggtttaagtgatttttttgttttttaaagtgttgggattataggtatgagttattgtatttggtcgattttggtattatttaataaaatgacgtatttattaatttttttatttagtaattttatttttaagaatttagtttgaagttatatttttaatattgtaaaaacgtgtatgtaaaaaaagtatattgtagtatggtttgtaattgtaaaattttggaaatggtttaaatgtttatatataggagagtggttgaaaataatacggtattgttataaaatggagtattatgtagttgtaataaagaatggttaagatttttatgtatttgtaaggaatgatttttaggatatagtgttaagtgaaaaaggtaaagaggaaggggtgtttatagtttgttagtttttttgtaataagggaggggaaagaaaaagatatatatgtttttgtttatttgggtaaaaagaaatataggaagaatatatgagaagtaaagaggattttttatttacggagggtagataaaaataggttggaaaaaatggaggatgaaaatagggtaaaagagatggggtgagggatatttttttatgtgtaattttttttgatagttttaatttttttttttttttttttttgagatagagttttgttttgttatttaggttggagtgtaatggtagaattttggtttattgtaatttttgtttttgggtttaagtgatttttatgttttagtttttttagtagttgggattataggtatttgttattacgtttggttaattgtatttttggtagagatggggttttattatgttggttaggttggtttggaatttatgattttaggtgatttattaatttcgttatttttaaagtgttaagattataggtatgagttattatgattggttagttttaatttttagaaatatatgatgttttattttttaaaaaagaaattattagtggtttacgtttgtaattttagtattttgggaggttgaggttggtagattatttgaggttaggagtttgagattagtttggtaaatatgataaaattttgtttttattaaaaatatagaaattaatcgggtgtggtggtgtatgattgtaatattagttattcgggaggttgagataggagaattgtttgaatagggaggtggaggttgtagtgagttgagattatgttattgtattttagtttgtataatagagtgagattttgttttaaaaaagaaaaaaataaaataaaagtaagattatgttttttgtaggaatatggacggagttggagattattatttttagtaaaaaaacgtaagaatagaaaattaaatattatatgttgttatttataattgggagttaaatgatgagaatttatgtacgaaaagaaaggaataatatatattgaggtttattttagattggagggtgggaggagggagaggagtagaaaaaataattattgggtattaggtttagtatttgggtgacgaagtaatttttataataaatttttatgatatgagtttatttgtataataaatttgtatacgtatttttgaatttaaaattaaaatgtttaaaaattgttatagtaggtcgggtatagtggtttatgtttatggcgttattatattttagtttggtgatagagtgagattgtttaaaaaaaaaaaaaaaaagaaaaaaagaaaaataaattgttatagtaatagtttggaagaggagattaagagtaattaattgatattaaaattattggataaaagtataattaaagatagattatagtttaaagtatttttttataagatatttgttaattataaagaaaagagtgattttgttatggagaaatttttttttttttaaattgagatagagtttcgttttgtcgtttaggttggagtgtagtggcgcgatgtaatttttatttttcgggtttaagaggtttttttattttagtttttcgagtagttgggataatagtcgtgtaatattacgtttggttaatttttgtatttttagtagtaattaagttttattatattgtttaggttggtttt

SEQ ID NO: 107 - DNA, 6368 bp, Artificial Sequence
  chemically treated genomic DNA (Homo sapiens)
tgtttcgttttaagtttttttagaatattgtttttggtcgtttttggtttgtaagattatgttttaatataatttataacgtaaaatttagagataaagtttattttattagaatggtttttttgttttttaagtttatttaatgttaggattttttttagttgtttagattttagttaattatttaaatatggtggggggttttggaggggtattttgttattacgttagcgtgggaatgaatttttttttttacgaggggtgttattttgatttaagtgttttaattttatttagtcggaagttatcgcgggattgttatatagtgttttagtagaggttataaagaaaggtagggaaaaatgttaaataatttagttgatattagaagggttttggaagagagaatgaaggaggggaatatagtggtttattataaaatagaatcgtaagattagtgtatgtgtatagtagggagaaagaaattgtgttttggtggaaatttttgttttattttggttatatttttttacgtgttttttacggtttatatagacgtagagtatttttgtgttattaagagttcgttatattataaatataatttttacgtgttaatttaaaagtaaattttaaaaaagatgaaggaggatgattggcggaaagtgtttaaaaagattttttatggtggcgatattggggagaggtgggtagtattggttttaattttttaggatacgtttagtgatcggtgatggtttcgtatattgtagatgttagagatatttttttagagttattcgaatttcgttttgttttcgaggttttgtggtcgtttattttttattaggtttttaattaagttttaatgaatttagttaattagtgttattttgattttttgaatttagttttaacgtttgtttagttttattattgagggaattaaacgaatttgtaatacgtgttaagtatgaaagttatattataaaaatttttttttttttttaattttttttttatcgtggtaaaatttatagaatagaaattggatatatttgttagcgtatagttagtgggattaaatgtattcggggtttttttagttggttaaggggttggtgtgaggtaaaggtattttcgattaggttatagggaattttacgggaggtttagcggatggtttggtttagggattttacgtttacgttttaatgtttgtaggagtggtttgggtaatttttgtcgtgtttgggtttatgggaaacgggtgtaaatttgcggttttttttaaattgtttagtgggcgattgcgatttcgttttcgaggtggagggtggtatagacgaagggaaacggggggtagtttggttcgtagattgggttttggtttttttttcgagtaggaggtggtttcggaatcggttattcgttcgcggtatcgacgtttttttcggttttcgggagggatttttgcggggtcgttagttttagcgttttcgcggatagtacgcgttttttttatcgagtttgcgaggaaggcgtttcgttttttattttttcgggagcgagttttagttttcgggacgtagtttatacgcgttagtttagtacgaatcggtttcgggtagggtcgtatttattttcgggattagttcgcgtttcgtatttcgtttttcggcgttcgttttggataggtgttttttgttttttcgggattttcgtatcgggatatcgcgcgtttttcgtttttttcgcgggcgtaggagtttgaggcggcggttcggggacgcggttaatttgggagagagcgggggcgggggtcggttggggaaggggtcgttcggaggcggaggggtcgtcgcgggagtttggaagttcgcggggtcgggtcggggcggcggggcgggtcggaggcgttggtcggggcgacggttatttatttttttgttcgggatttattgcggtttttttaggtcgaacgggttttcgaaggcgcggtgttcgggtattatgcgtaggtcgttcggggagcgtattagttttttggcgtcgcggcgcgcggatatttcggaggatatgacgtcgttttagtttttcggttagcggtttcgtattcggtttttcgtttagttcggggtatcgttcgtttcgtttcggttcgcgcgcggttgatagcgtcggcgtttaatcgttaagttcgttacggagcgcggattaatcggagtttgaatttcgttttatcgttgttttttttaattcgtgtaagggtatcgtttttgtaattttgaggtcgattattaatcggcggcgagggttggttcgggtacgtttcgttttttttagggagattgagattttggattggttagttagttagttacgttagcgtcgtttcgtttttgattggtgtagtttatttagggtgttaggcgtttattggaggagaaggtcgagaggagtaggacggcgggaagaggagtgcggaattcgcgggaggtgaggttcgtcgagtcgggttgcgagtcgggttgcgagtcgggcggtagcggggtcggaggtcgtgggcggtagcgggcgtgaggggtgaggtagggttaaggggcgggggcggtcgcgggtttttattgttcgagtttgtgggagtaggcgggtttggggttgtagtatttatttcgggagtttcgtcgtagttcgggtagcgtttaggtatttcgtcggggtcgggtcgcgtgcgttcggagcggggaaggcggttttcggggttttcggtgcgcgcggggaggcgttcgtttaggggaggtcgaggtgggttcggcgttgcgttttcggttttcgatgttttcgttcgttcgtttgggatcgcgttggtttcgtatcgaagtgggagaggtttgaatagttattttaatattttgatttggaaagaaaattttttaggtcgggcgcggtggtttacgtttgtaattcgagtattttgggaggtcgaggcgggcggattacgaggttaggagtttaagattagtttggttaatatggtgaaatttcgtttttattaaaaatataaaaattagttgggtgtggtggtacgtgtttgtaattttagttgtttgggaggttgaggtaggagaattgtttgaattaggattcgggaggcggaggttgtagtgagtcgagattatattattgtattttagtttgggttatagaaaaagattttattttagaaagtatataaaaaaaagaagaaaatgtttgtttattttgtttttaattttttattataaggcgtgaatttttattgttttttttgagatagtttggttttgttattcggggtggagtgtagtggcgtttttatagttaggtataatttcgattttttaggtttttaagtagttgggatcgtaagcgttattatattggttagttatttttttttttttttttttttttcggtagagagtaggttttgttgtgttgtttaggttggttttgaatttttgggtttaggcgattttggtcgttttggttttttacggtgttgggatgataggtattagtagtgttgaagtttgtgaggtggggtttttgtggttgattttgtttttttttggggttattggtagtgtaggggtttttgtgtgtggaggaaataaggagatgattaaagtatgattttacgaattatacggtttattgttaaagaagatttgttttcgggtttatagtgtttagaggggaggagaggggaggaggtgaagatatttggtagggaagtagggtttttatggatggggtgtatttacggtagggaggtgagtggtagaacggttagggttcggttgttttgttgggatggagcgggtttttggagagtgagatttggtgagagttcgaggtttgttttggtagtagtggagagcgtgagagcgggagttttttgagaagttgggatcgaggtttagtttttaggttagtagcgtatagtttgttttaaagtatttgtataatttttaagttgatgtttgtttttgtagtttagtagttagggttagtaatttatataagggagtgtttgataaggtttaagtggtatttttaaggttgcggagtttatttaagtttttatatatgtggtttgataagatattatatttttgtaggggggttaggttattttaaaatattagattatgtaagtgttgtgaattattttaaagttatatagtaggttttagggtttaaggtagaggagtgagtttatttcggaaggtttagagtagttttaggtagtaattacggtatttttagagtttggtgtgtgagtttaatagttttggtgtgatcgttcgtatttatttagtagtacgtgatattagttttttttttgaagttattgtttagttcgggtgttgtaggaagatatataggtttgttttgggttagttttttgtttgttgtgggttgttttttgtgtgtggtttttatttcggtgtagagagatgggttggttatatttttgttttttatagcggcgagaggatagaggtatgtgtcgggttgtttgtggagtttttaggttagtgtttgggatgcggtaggtgtttggtgttaaagggaaaatattttaggatatttgtgaaagtacgttaggtagagattaggtttttatttagaatttttgagagatgtgggaattattatattgcggttttgtagtgggagagaggttgggtttagttttgaataggttatgggttggtggcggtttatagttttagagttgggtaggggtagaggatggaaggttgttaagaggaatttttaggggcgaaggggatgtaggtttaattgatttgttagattaggtcgttcgggggatagtggaagatgaggcgtttaattagttgttaagggtgatgggatacgggaggaggtcgtcgttaaatagattttgagttaggtttgttaaattaagtttttagtaggatgtgtatagagggtttaggaggagttttaggagtcggattgtcgttggttaatcggtgagtttgttattcgttagtggatattttgtttttaggtgttttggtttcggttcgcgttttgaaggcgggagacgttgtagttacgtgttggttttttcggtgtttttgttagcgtttcgttgtttgatatagtttaagttttgtatttagatttagtttgggatagtagtttttcgatagtttttaggtttagtttgtttgtgatagttacgtttgtttagggaattattttttcgtgtagatttgggttgtgttttgggtggtatttcgggtgtggggttttttattaggtgcgaggtttatattttttaggttgttttttgtttttagggtttggagagttttatgttttgaaaatgattttttttcgagtcgggtaaggtcgtattttttttggtagtgtagtgttttttttggaggtggtatttttttttgatttgttttttgtgtttgggaattttatttttttattttggttagttttgttagtagtttggagttggtttagcgttttatcgttttgttttggtttgcgttcggttttttagggtggtttttcgttagtttttgttaggtttgtttgggtaattaggtttgggtatttttttgttttttgtttagaaaatttataggttgtgggggttcgggagttaagtttggtgcgcgggtaggaaacgtattttggagtattagtttttttgttttgttcgttttacggggtgtttgggggcgtgttttagtttgttgtttttgtagtttgttttttacgtcgggtttgtttttttgagtaggttgaatatgggtatacgagtgattagcgtgatcgtgtttaggttagtgtcgtattttgtgtggtttaagggaaaattttttttaagtttacggttcgtttttttttttgttgggttacggttaagggcgttaggttttattggaggatatggattttggattcggttttcgaggttgttgttttttagtttttttatgttttggatatttttggttttattatttgggaggtcgataggggatgtagagtggtttgttggaaaggttttatgtgattttaggttgagtttttgagtagtttgttgaggtcggaggggagaagagttgagttttttttttgttgggttaggttcgggttgtggaatggttgttagttttttttttgggagaggttgggtggggtttatagtatttttttttcgttttataggaagttgttttttgttgttggttgttgggggcgattgatgtttggatttttgagtattttgttaattttagatttatttttttattttttttaga

SEQ ID NO: 108 - DNA, 6368 bp, Artificial Sequence
  chemically treated genomic DNA (Homo sapiens)
tttggaaagagtgggaaggtgagtttgggattggtagggtgtttagggatttaaatattagtcgtttttagtagttaatagtagaagatagttttttgtgggacgggaggaaggtgttgtggattttatttagttttttttaggaagggagttggtagttattttatagttcgagtttggtttagtaagggagaagtttagtttttttttttttcggttttagtaggttgtttagggatttagtttggggttatataaggtttttttaataggttattttgtattttttgtcggttttttaaatggtgagattaagagtgtttaggatatggggaaattggaaggtagtagtttcgagggtcgggtttaggatttatgttttttagtgaggtttggcgtttttggtcgtaatttagtagaggaaagggcgggtcgtggatttggagaaggtttttttttggattatatagaatgcggtattggtttggatacgattacgttggttattcgtatgtttatgtttagtttgtttagggagataggttcggcgtggagaatagattataggagtagtaggttgaggtacgtttttaggtatttcgtgaggcgggtagggtagggaagttggtgttttaggatgcgttttttgttcgcgtattaggtttggttttcgggtttttatagtttgtgggttttttgagtaagggatagggaggtgtttaggtttggttgtttaggtaggtttgataggaattggcgagaagttattttggagggtcgggcgtaggttaaggtagggcggtggggcgttgaattagttttaaattgttggtagagttggttagagtgaggaagtgaggtttttaagtatagaaggtaaattaaaaaggaatgttatttttagggaagatattatattgttaaaggagatgcggttttgttcggttcgaaaagaggttatttttagaatatgggattttttaagttttgaggataggaggtagtttggggagtatgaatttcgtatttggtaggggattttatattcgaggtattatttaaaatatagtttagatttgtacggagggatggttttttgagtaggcgtgattgttatagataggttgggtttgggggttgtcgggaggttgttgttttaggttgggtttggatataaaatttggattgtgttaagtagcgggacgttggtaggagtatcgggaaggttagtacgtggttgtaacgtttttcgtttttaggacgcgggtcgaggttaaggtatttggaagtagagtgtttattgacggataatagatttatcggttggttaacggtagttcggtttttgaggttttttttgggttttttgtgtatattttgttgagaatttggtttaataggtttggtttaaagtttgtttagcgacgattttttttcgtgttttattatttttgatagttgattaggcgttttattttttattgtttttcgggcggtttgatttggtaggttagttgaatttgtatttttttcgtttttgggggttttttttagtaattttttattttttgtttttgtttagttttggagttgtaagtcgttattagtttatggtttgtttagagttgagtttagttttttttttattgtaagatcgtagtgtggtggtttttatattttttaaaggttttgaatgaaagtttggtttttgtttaacgtgtttttatagatattttggaatattttttttttaatattaagtatttgtcgtattttagatattggtttgggagttttatagatagttcggtatatgtttttgttttttcgtcgttgtgaggggtaggggtgtgattagtttatttttttatatcggggtgaaggttatatatagggagtagtttatagtaggtaaggggttggtttaagatagatttgtatgtttttttgtagtattcgagttgagtaatgattttagggggagagttgatgttacgtgttgttaggtgagtacggacggttatattagagttgttaggtttatatattagattttggaaatgtcgtggttattgtttggagttgttttgagtttttcgaggtggatttatttttttgttttgggttttgggatttgttgtgtagttttgaagtgatttatagtatttatatagtttgatgttttggggtgatttgatttttttgtaagagtgtgatgttttattagattatatatgtgaggatttgagtgaatttcgtaattttgggaatgttatttaaattttgttagatatttttttatgtgagttattgattttgattgttggattgtaaaaatagatattagtttgaaggttgtgtagatgttttgaggtaagttatacgttgttggtttgggagttggatttcggttttagttttttagagagttttcgtttttacgttttttattgttattaaggtaaatttcgaatttttattagattttattttttaggggttcgttttattttagtagagtaatcggattttggtcgttttgttatttatttttttgtcgtgaatgtattttatttatggaggttttgtttttttgttaggtgtttttatttttttttttttttttttttttgagtattgtgaattcgagaataaattttttttgataataaatcgtgtgattcgtggaattatattttgattatttttttattttttttatatataaggatttttgtattgttaatggttttaggagagggtagagttagttatagggattttattttataggttttaatattgttgatgtttgttattttagtatcgtgggaggttaaggcggttaaggtcgtttgagtttaggagtttaagattagtttgggtaatatagtaagatttattttttatcgaaaaaaaaaaaaaaaaagaaaaatagttggttagtgtagtggcgtttgcggttttagttatttgagagtttgggaggtcgaggttgtgtttagttgtgaagacgttattgtattttatttcggatgatagagttagattgttttaaaaaaaataataaaaatttacgttttgtaataaggaattaaaggtaggatgaataaatattttttttttttttttgtgtgttttttgagatggagtttttttttgtagtttaggttggagtgtagtaatgtgatttcggtttattgtaattttcgtttttcgggttttggtttaaataatttttttgttttagttttttaagtagttgggattataggtacgtgttattatatttagttaatttttgtatttttagtagagacggggttttattatgttggttaggttggttttgaatttttgatttcgtgattcgttcgtttcggttttttaaagtgttcggattataggcgtgagttatcgcgttcggtttaaaggattttttttttaaattaaagtattaaaataattgtttagattttttttatttcgatgcgaagttagcgcggttttaggcggacgagcgaaggtatcgaaggtcgggggcgtagcgtcgggtttatttcggttttttttgagcggacgttttttcgcgcgtatcgggggtttcggagatcgtttttttcgtttcgaacgtacgcggttcggtttcggcgaggtgtttgaacgttattcgagttgcggcggggttttcggggtgagtgttgtagttttaggttcgtttgtttttataggttcgggtaatggagattcgcggtcgttttcgttttttgattttgttttattttttacgttcgttgtcgtttacgattttcgatttcgttgtcgttcggttcgtagttcggttcgtagttcggttcggcgggttttatttttcgcgggtttcgtattttttttttcgtcgttttgtttttttcggtttttttttttaataggcgtttagtattttgagtgggttatattaattagagacgaagcggcgttaacgtgattgattaattaattaatttaaagttttaatttttttgagaggggcggagcgtattcgggttagttttcgtcgtcgattggtgatcgattttagggttgtaggggcggtgtttttatacggattggagagggtagcgatggggcggagtttaagtttcgattagttcgcgtttcgtggcgggtttggcgattggacgtcggcgttgttagtcgcgcgcggatcggggcggggcgggcggtgtttcgggttgggcgaggggtcgggtgcggggtcgttggtcgagaggttgaggcggcgttatgtttttcgaggtgttcgcgcgtcgcgacgttaagaagttggtgcgtttttcgagcggtttgcgtatggtgttcgaatatcgcgttttcggaagttcgttcggtttggaggagtcgtagtgggtttcggataaggaggtgggtggtcgtcgtttcggttagcgttttcgattcgtttcgtcgtttcggttcggtttcgcgggtttttaggttttcgcgacgattttttcgttttcgggcggttttttttttagtcggttttcgttttcgtttttttttaggttggtcgcgttttcgggtcgtcgttttaggtttttacgttcgcggggagggcgggaggcgcgcggtgtttcggtgcgggggtttcgggagggtaggaggtatttgtttagggcgggcgtcgggaggcggggtgcggggcgcgggttggtttcgggggtgggtgcggttttgttcgaggtcggttcgtgttgggttagcgcgtgtggattgcgtttcgagagttggggttcgttttcgagaaagtggaaggcggagcgtttttttcgtaggttcggtggggagggcgcgtgttgttcgcggaagcgttggagttggcggtttcgtaggggtttttttcgggaatcgggggaggcgtcggtgtcgcgggcgggtggtcggtttcgaagttattttttgttcggaaggagggttaggatttagtttgcgggttaggttgtttttcgttttttttcgtttatattattttttatttcggaagcgaggtcgtagtcgtttattggatagtttgaaggagatcgtagatttgtattcgttttttatgggtttagatacggtaggagttgtttaggttatttttgtagatattggggcgtgggcgtggggtttttgagttaggttattcgttgggtttttcgtggggttttttgtgatttgatcggaggtgtttttgttttatattagttttttggttaattgggaaggtttcgagtgtatttaattttattggttgtgcgttaataggtgtgtttagtttttgttttgtggattttattacgataaaaaaaaaattgggggagaaaaagaatttttgtaatatgatttttatatttaatacgtgttatagattcgtttaatttttttagtgatagaattaagtagacgttggaattaggtttaagaagttaaagtagtattaattgattgggtttattgaagtttggttggaggtttggtggggggtgagcggttatagagtttcggggataggacggaattcgagtgattttggggaagtgtttttggtatttatagtgtacggagttattatcggttattgagcgtgttttggagagttgagattagtgttgtttatttttttttagtatcgttattatgaggagtttttttagatatttttcgttaattatttttttttattttttttaaaatttatttttaagttgatacgtgaaaattgtatttatggtgtaacgaatttttaatagtatagaaatattttacgtttgtatgaatcgtaaggagtacgtgagaaagtgtggttaagatgaggtagaggtttttattaaagtataatttttttttttttgttgtatatatgtattgattttacggttttgttttatagtgaattattgtgttttttttttttatttttttttttagagtttttttggtattagttgaattgtttagtatttttttttgtttttttttgtggtttttgttgaggtattgtgtggtagtttcgcggtgattttcgattgagtggagttgaaatatttgagttaaggtggtatttttcgtggaagagaagatttatttttacgttggcgtggtggtaggatatttttttagagttttttattatgtttggatgattaattgggatttgagtagttgagggaggttttagtattgggtgggtttgggggatagagaaattattttaataagatggattttgtttttgagttttgcgttgtgaattgtattggagtatggttttataggttagaaacgattaaagatagtgttttggaggaatttagaacggggta

SEQ ID NO: 109 - DNA, 6040 bp, Artificial Sequence
  chemically treated genomic DNA (Homo sapiens)
tggggtttaagtaattattttgttttagtttttcgagtagttgggattataggtgtacgttattaagttcggttagttttttttgtattttagtagaaatggggttttattatgtggttaggttagtttcgaatgtttgttttagttttttggaagtttttttttgtaattagtatttaaaagtttgttagagaagattagtatttatattagatttttattagtttaatgaagtggttattaaaggtgtggtttatggaatttttttatgggtttataagattagaattatttttataatattaagatatttgttttttaattgtgatgttatttttatggatgatgtaaaagtaatattagtaatagaattatttgaattgttatttttttatttatttttgatataaaaaatttgttttttttaatatttttgtgtaattaatggtattgttgtatagttgaaagggtatagtatttcgtgataaattggtttcgtttaaattttagttttgttatttataagtagtgtgatgttgggtaagatatttggtttttcgtatttgtttttttatatgaaaaatgtggttaataatacgattttaataaaattttgtatgtaaaataaaatatttgttagagtaggtgtttaacgaaaatagtaagtttttatttaacgttatttataggtttttggaaaatgtaattttaagttaaaagatatataataaaaaaaatttattataggcgaattgatataaataagagttaagtttcgatggtatatttttagttataaaagtattattaaatttttaaattaatattaaaatttttttaatatttaatattgaagtaaatgtgagttatatatttatttaagaaagattaataaaaataagtaagatagttggttatttgttattttagtttagtgttgacggtgtcgggagttattttagtagtttggagtataggatattattttagtgtagagtatttaaattgggagagtgtagatattttaataaatttattgtatatatttttgggatgtagaagggaattggagtattaagagaaaatttatgtagatatgggaagaatagatatgaagataacgtgtaattgggaatggagttttttttttatatacgttattgaggatttgttgtattttttttttatttaataaattatttaagttggagttgtgttttattattttttattaagtatttttaaaacgatttttttagtttttttttttttttaatttaattgtttattagagttgagatatttaattattgtatatttgaattatagtatttgtttttaagttggttttttagattttaatttttttttatttaaatatattttatgttgttattagttggttttttaaaatgtatattttttatttttttgttttaaagtttttattaagtaagtaattaaatattattaaaatataaagtttttggtatggtataaagttttttaaaatttggttttaatttttttagttttatttattattagtttattatatttgatttttttttatttttgttatattaaggttttatgtaattattgaattttatgttttttgtttttataattgttattttttttatttacgggatagagattgttgttttatttttagttaatgattttttttttaatattttttaaagtataggtgagagagaattattttttttttggggatattttttaagtagtttttagttagtattattttttttattgtgtttaatgattttttatatattttttgttataagaggagagaaaatattttatatttattttttggagatttagtttaattatgaaatgtgggtaattatttttgttttgtagagtttgtgaaaattatttagtgtattaagaaaaagatatgaaaataaatttttttagagttaattaagtaaaggttcggaattggaaatgattttaattttgtttggtttagtttaaatttatgttttttttattatatgtgttgttttgttataatatagtagataatagatggaatttatttatttaataattttttttattggattgtgaaatttttgaagatattgagtatgtttgtatttttagattttttttttttttttgagatggagtttcgtttttgttgtttaggttggagtgtaatggtataatttcgatatatcgtaatttttattttttgggtttaagtgatttttttgttttagttttttaagtagttgggattataggtatgtgttattacgttcggttaattttttatttttagtagagatggggtttttttatattggttaggttggtttttaattttcgattttagttgatttatttattttggttttttaaagtgttgagattataggtttagatttttaatggagtaataattttagttggtattgtgattgtagagattaaaatatttagtttttaagaattttgtttagagagggagaaatgtaggtaatattttattgttgttttttgtgaaaagggttatgttagagggatattggaagtatatatatgaattaggaatatttttatagatatttaaagagagtagaagaaaatagaaggggttaagggaggttttttggaaagagatgagatatgagagaaatgttgaaggatgttaggtgttggggggaataaggtattttgaaattttttaaaagtattaatttataagtgttataattattgtttatgttgatagttgtaaattattattgttgataaatattttatttttgaaatgttttttaaaaagatttttggttggggacggtggtttacgtttgtaattttagtattttgggaggttgaggtgggaggattacgaggttaagagatcgagattattttggttaatatggtgaaatttcgtttttattaaaaatataaaaattagttaggcgtggttgtgtacgtttgtagttttagttattcgggaggttgaggtaggagaattgtttgaatttaggaagtagaggttgtagtgagttgagattatgttattgtattttagtttgggtaatagagggagattttattttaaaaaaaaaaaaaattattaaaatatagtaatttaggtttattaagttattattattgggttattttataaataaattaagtttagatgcgaatttaaagatattgagatattaatttattttttaagttgttaagttagtttttttgaaattttatttcgtagttttgtaaataatgtatttttgatattttaagtttataggaataaaaaattatttgttagttgttttcgttttttatttatgtttaatttatgtatttatatttataagaaataaattattaagttttattttatttttagttatgttgtgtttttatcgataatagtatgaagatttcggggatttggatattaaaataagtttgagtattggttttataatttattaggtgtgattcgaggtaagttagtttttttatgttttattttttttatttgtaaatatttatttagaagttgttgtgaatttgatatttttatgtttataaattgattttttgaaaagagtttggtatataggacgtgataataaatgaaagtatttgttatttttggaaaaataagtatgataagatagtttatatattgttgattttaagtatagtatatgtattttatttttagttagtttgatagtgagataataaaaagagttatttttgatttgtattacgagtagaagaatttaattttagtttttagaaagatgtataagaattaagagtggtagtttttttagttttaattgttatttttttattaggtggtaaattcgtttagagaagaaaatgaattattgttatatgggattttgtagtaatttttgtgaatataggtttataattttttattatggagatttaagttttttggagttatagttgtttttgggtttatttgtaggtatgtattttttgtttagaaatatatataatatttggtatatggatttggaggtaaaagaggaggaaggtttgaggttagatattattttaataagtatattaagtttttagaagggtaatttatttttgtagagaatttttaattattaaaatttatagtttgtaaagtagtatttttaaagttaagagaagaaggtggaagggttttgagaggttattgattaaatagatgaaaatgaaggtatggagtttggtgttaaaagaaattttttttaaaaattaaataataatattagagtaaagtttttagggcgagataaggagttgtaataaaataagcggaaattcgagaagcgttaatgttttaaagggttaatgattatatataatttacgtagttaacgtgttaaaatatattaacgtattttttttttttaaataaagtaggaaagcggattttgtatgaggggcgggttgtcgatttagtagtttttttcggatagttcgttttgattttttttggttggtcgtggagggattatatggttttaaggttttttagtttcgggtttatatatttcgggttgtcgtataaattttagttttagtttagatttataattttttttcgaagattaatcgcgatttgggagttttattttttattatagcgaggtcggcgatgtcgtagttatattattttttcggggtttaggcggaagaggttgtatgtttcgtttgtttttttcgttttttttagtcgttcggttgggtttgttacggtatcgtttattaagacgggcggttaagatattaggataggtttttttttatcggaaaaggcgggatttagattacgtttcgtaggtcggcggaagtagttgatatttttattggttgtaaaattttgatttgtgaaagcgggcgttttggaagatatcggaagtagagttacggagaggtaggattcggaagtggggttgtttttttaaataataaaaatttgaggttttgttttttttatttttttgttttttttttaaaaaagttttttgttatttatttttagaattttataatgcgagaattttttttaatttgtgagttttcgcgatttttttttgtgggtttttggggatgttagggttttcggtattatttttagggtgcgatttgtttattttttttttagttttttcgtttgtatttgagggatttttgggaatgcgaagtatttttgaaatgttttgtgttggttgtgggattgggaggacggttgaatttagagggtagtgttgagtaggttgtttgagtatttttttagtattggtttgtttttttaatttttagatattggtaaattgtgggttttaattaggtatcgaggttgaaacgtattaggtaatttgaggttaggaaagaattttttgtggtaattaatgggaaggaattgtcgtttgcggattgtagcgattgattaggtattttaaagagattaattggtaagataaatgataaggtaatttttaattagtagtagtatttagttttttttgattttaattattttattaggtgaggttttattatatatatacgtttttttttttgtattttatcgatggagaaataggcgttttgatatgtttgaatttgcgtagtttttggaattttaataaagtattagaaatgagagttttttattttttgtttttttatggtaagtttttggttttaaatgtgtggtgtatttttttttaggtaggagagagttttttttagaatgtttttaattttttatggatttagaaggtggatagagagaaagagagaaggtaatttacgtgagattttggtttatgaattgtattcggtttatgagatttttttgtatttagggtaatataatgattagaagatttgggattttgttatttgtgtttatattgtttattagggtatataaaggttttgttttaaattataattaatttgatatttgagtttg

SEQ ID NO: 110 - DNA, 6040 bp, Artificial Sequence
  chemically treated genomic DNA (Homo sapiens)
tagatttaaatattaagttagttatagtttaaaataaaatttttgtgtgttttagtgaataatgtaaatataaatagtagaattttaaattttttaattattgtgttgttttaaatataaaagggttttataggtcgaatatagtttataaattaaaattttacgtgagttattttttttttttttttttatttattttttaagtttataaaaaattgaaaatattttgaaaagaatttttttttgtttgagaaaaaatatattatatatttagaattaaaagtttgttataagggggtaaagagtgaaaaatttttatttttaatattttattagaattttaagaattacgtaaatttaaatatgttaaagcgtttgtttttttatcgataaaatgtagaaagaaaaacgtgtgtgtgtagtagaattttatttaatgggataattaaaattagaaaaagttaaatattattattgattaaaagttgttttgttatttgttttgttagttgatttttttaaagtatttaattaatcgttgtagttcgtaaacggtagtttttttttattggttattatagaaagtttttttttgattttaaattgtttagtacgttttagtttcgatgtttggttggaatttatagtttattaatatttggggattgaaaggataggttagtgttggggaaatgtttaaatagtttatttaatattattttttggatttaatcgtttttttaattttataattaatatagagtattttaaaagtgtttcgtatttttaagaattttttagatgtaaacggagaaattgaaaagggggtgaataggtcgtattttgaggataatgtcgagaattttagtatttttaaaagtttataagaggaagtcgcgggagtttataaattgagggggattttcgtattgtggagttttaggggtaagtagtagggaatttttttaaaaagaaagtaaaaagataaaaagaatagaattttagatttttgttatttaaagaggtagttttattttcggattttattttttcgtgattttattttcggtattttttaaaacgttcgtttttatagattaaggttttgtaattaatgagagtattagttattttcgtcggtttgcgggacgtgatttaaatttcgtttttttcggtggagaggagtttattttagtgttttaatcgttcgttttggtaggcggtgtcgtgataagtttaatcggacggttggagagggcgagaagggtagacgggatatgtagtttttttcgtttgagtttcggaagggtgatgtggttgcggtatcgtcggtttcgttatggtaagaagtggggtttttaggtcgcggttgattttcgagaaggggttgtggatttagattagggttggagtttgtgcggtagttcggggtgtgtgggttcggagttgagaggttttggagttatgtggtttttttacggttaattagagagaattaggacggattgttcgaggaagattgttgggtcggtagttcgttttttatgtaaagttcgtttttttattttgtttaggaaaaaaaaatgcgttggtgtgttttaatacgttggttacgtagattatgtgtggttattgattttttgaagtattagcgtttttcgagttttcgtttgttttgttgtaattttttatttcgttttaggggttttattttggtgttattgtttgatttttggggggagttttttttggtattaaattttatatttttatttttatttgtttagttagtagttttttaagatttttttattttttttttttaattttgaaaatgttgttttataagttataggttttaatagttaagagttttttgtaaaggtggattgtttttttaggagtttaatgtatttattggagtggtgtttagttttaggtttttttttttttttatttttaggtttatgtgttaaatgttatgtatatttttggataaaggatgtatgtttgtaaatagatttaaaaataattatgattttaaaaagtttgagtttttatggtgaaaaattatgagtttatgtttatagaagttgttgtagaattttatatagtaataatttatttttttttttggacgaatttattatttggtgggaagatggtagttgagattaggaagattgttatttttaatttttatatatttttttagaaattgaagttgaatttttttattcgtagtgtaagttaaagataattttttttattattttattgttagattagttaaaaataagatgtatatattgtgtttaagattaatagtatataaattattttgttatgtttgtttttttaaaagtagtaaatgtttttatttattattacgttttatgtattaggttttttttaaaaaattagtttataagtatggaaatattaagtttatagtaatttttgaatagatgtttataagtgaaagaagtgaaatatgaagagattgatttgtttcggattatatttagtagattgtaaagttagtatttaaatttattttaatgtttaggttttcgaaatttttatgttgttatcgatagaaatataatataattaaggatgaaataagatttagtgatttgttttttataaatataagtatataaattagatataggtggaaaacggaaataattggtaggtggttttttatttttgtgagtttgggatgttaaaagtatattgtttgtagagttacgaagtgaggttttaagaaggttaatttagtagtttaagaaatggattagtgttttagtatttttgagttcgtatttaaatttagtttatttgtgaggtaatttaatggtaatgatttaataaatttgaattattgtattttaatgattttttttttttttgagatggagtttttttttgttgtttaggttggagtgtagtggtataattttagtttattgtaatttttgttttttgggtttaagtaatttttttgttttagtttttcgagtagttgggattataggcgtgtataattacgtttggttaatttttgtatttttagtagagacgaggttttattatgttggttaagatggtttcgattttttgatttcgtgatttttttattttagttttttaaagtgttgggattataggcgtgagttatcgtttttagttaagaatttttttaaaaagtattttaaggataaaatgtttattagtagtaataatttataattgttagtatgaatagtaattgtagtatttgtgaattaatatttttaaagaattttagaatgttttgttttttttaatatttaatattttttaatattttttttatgttttatttttttttaaaaagttttttttaattttttttatttttttttattttttttaggtatttatagggatatttttagtttatatgtatatttttagtatttttttagtataattttttttatagaaaatagtaataaggtgttgtttgtatttttttttttttaggtagaatttttaaagattaggtattttaatttttatagttatagtgttagttggagttattattttattaagagtttgggtttgtaattttagtattttgggaggttaaggtgggtagattaattgaggtcgggagttggagattagtttgattagtgtggagaaattttatttttattaaaaataaaaaattagtcgggcgtggtggtatatgtttgtaattttagttatttgggaggttgaggtaggagaattatttgaatttaggaggtggaggttgcggtgtgtcgagattgtgttattgtattttagtttggataataagagcgaaattttattttaaaaaaaaaaaaagagtttggggatataaatatgtttagtgtttttaaggattttatagtttagtgggggaaattattaaataagtaaattttatttgttgtttgttatgttgtagtaagataatatatgtagtagagagagtatgggtttagattgagttaaatagagttagaattatttttagtttcgaatttttatttggttaattttaagggagtttatttttatgttttttttttggtgtattaaatgatttttataaattttgtaaagtaggaatgattgtttatattttataattaaattgagtttttagagaatagatgtgaagtattttttttttttttatagtagaagatatgtagaaaattattaaatatagtggaaggagtagtattggttgggaattgtttgagagatgtttttaagaaagaagtaatttttttttatttgtattttaaagagtattagggaaggagttattagttagaggtgggatagtaatttttatttcgtagataaaggaaatggtagttatgggaataaaaggtatgaagtttaatagttgtatggagttttaatgtggtaggaataaaaagaagttaagtatagtggattggtgatagatgaggttagaaagattggggttagattttgaagagttttgtgttatgttaaagattttatattttgatgatgtttaattgtttatttgataaaggttttggagtagggaaataaaaggtgtgtattttagaaaattaattggtaataatatagagtatatttaaatggaggaagattagaatttgggagattagtttgaaaataagtgttgtagtttaggtatataatgattgaatgttttaattttgatgagtagttgggttgaaaggaaaggaaaattaggaaaatcgttttgaagatatttaatgaagggtgatgaagtatagttttagtttggatgatttattggatgggaaagaaatatagtagatttttaataacgtgtatgaggaagaaattttatttttaattgtacgttgtttttatgtttgttttttttatgtttgtatggatttttttttggtattttagtttttttttatattttagagatatatataatgggtttgttgaggtgtttatatttttttagtttgagtgttttgtattggaatgatgttttatattttaggttattgggatggttttcggtatcgttaatattgaattgaaatagtaaatagttagttattttatttgtttttattaattttttttaagtggatgtataatttatatttattttagtgttgaatattagaagggttttgatattgatttggaagtttggtgatgtttttgtgattagaaatatgttatcggaatttaatttttgtttatattaattcgtttatggtaaattttttttgttatatattttttggtttaaagttgtattttttaaggatttgtggatgacgttaagtgagggtttattgttttcgttaagtatttattttgataggtgttttattttatatataaggttttattaaagtcgtattattggttatattttttatatgaagaaatagatgcggagagttaagtgttttgtttaatattatattgtttataaatagtagagttaagatttaaacggaattaatttgttacgaaatgttgtgtttttttaattatgtaataatattattaattgtataaaaatattaagaaaagtaaattttttatgttaggagtgggtgaggaggtagtagtttagataattttgttgttaatattgtttttgtattatttatgaaaatggtattatagttaaaaggtaagtattttagtattataaaaatagttttgattttatgaatttatgaaagggttttatgaattatatttttgataattattttattaggttaataggaatttgatgtgggtgttgattttttttagtaagtttttgaatattgattgtaaagaaaaatttttaggaggttgaggtaggtattcgagattagtttgattatatggtgaaattttatttttattaaaatataaaaaaaattagtcgggtttggtggcgtgtatttgtagttttagttgttcgggaggttgaggtaggataattgtttgaatttta

SEQ ID NO: 111 - DNA, 8607 bp, Artificial Sequence
  chemically treated genomic DNA (Homo sapiens)
gaaggatggtttgagttcgggaggtggaggttgtaatgagttaagatagcgttattatattttagtttgggtgatagagtgagatttttttttaaaataaaagtaaaattaaataaattttattaaaatagttatttaatttttttgtttatagttttgtaatttgtgtagagtttggtggagattattagtttgtttaatgtttttagtgttgagatagttttttaaggaggattttttttttagatagttttatttgcgtggttgttaagttggtgttgggtgatatttaggttattgttggggttgttggtgtttagtgtttgtattagtttatttgggttattataatagatttgggttgttataatagataatattatagattaggtagtttaaatgatagaaattagtttttttatagttttagaggttggagggatttttttttgggttgtaagtggttgtttttttattttgtgtttatatgatttttttgtgtgagtggggagagagggagagagggagagatggggagggagggagggggagagagagagagagcgagcgagttttttagcgtttttttgttttttgtttttttttatagaagtattaattttattaggagggttatttttatgattttatttaaatttgattattttttaaaggttttatttttaaatattattatattgggggttagaattttaatatatgaattttggggagatatatttagtttataatagggtttttttatgtggttatgttgggtttttatagtatggtagtttttatatatggtatttgggtttattagggtgtaaaagataaatttgttaggtattttaaaggttttagtttagaattatttattgttttgtaaatgtttatatattttattggttatagtaggttatgaggtttgtttagatttacggggaaggaattatataagggtgtgaatgttgagaggtatggtttatacgtattattaaaatgatattttgttatttttttttttttattttatttattttttttatatgttatagtggtttttatatatttttttttaatttttttttttgttttttaatatatatattattattattattagttatagtttattaattttttgtttttttttatttttaattttgtattatttaaatttaaaaggattttgtattgatagaaatagaacgaataaagttagaatttttttgttgtggaggaggaagggagtagttatatatgttgttatattattaataatgtttattttttgatttttgattaatgaaggttttttgttaggggaagtaatgtttaaagtttatatttttttttagcgttatagatgtttagttgtatagaggtggttggttttaaagatttttataaaaatagttgagatgtaaataagtatagttattagaattttttttattttttttaagaaatagatttgtattgaagggtgtatggaagatagagagtggggatagggagaaggagaagaagggggaggaggaggagtaggaggaagaggaaggggaaaagtaagagggagggagggaaggaggaagggagagagagagagaaaggaagaggaaaaatagagattatatataagataaaaatatggatataaagtatgtaaattttttttattgtattgagtttttagtaattttttttattagttttattaaaaatattttttaggttgagcgcggtggattatatttgtaattttagtattttgggaggttgaggtgggcggattatttgaggttaggagttcgagattagtttggttaatatggtaaaatttcgtttttattaaaaatataaaaattagtcggtatagtggtgggtgtttataattttagttatttggtaggttgacgtaggaaaatcgtttgagtttggtggcgggtgggagcggcggaggtttgtagtgagtcgagatcgtgttattgtattttagtttgggcgtagagtgagattgtttttaaaaaaaaagagggtattagggtatattatttttatatgttgataagttgttatataagttttattaatttataatttaatattatatattttatttatttaaatttttagttttttaaagtatattaataaagttattaggaaaatgggattagtataattaaagatgttatagattgtatataattttgatacggatagtaacgtgattaaggagtggttttttttaggaaataattttattaaaaaaatttatgaaaataaaagtaatttaaaatttttaagatatattaaatgtatgattgtggttttatattgttatttagtatgcgttgtattgtaggaaataaaatattttttttttagggaatgttaaattgatttcgaagatagtgaaagttttttattatttattattttagtgttttttggttgtattaaataataaataagtgaattattttattttttaaaagttatattttaaaaatgggataaagtgggatttttttttttttaaaaatgttttagttaggtataggtttacgtttgtaattttagtattttgggaggttaaggtgggcggattatttgaggtcgggagttcgagattagtttgattaagatggagaaattttatttttattaaaaatataaaattagttgggtgtggtggtatatgtttgtaattttagttatttgggaggttgaagtaggagaatcgtttgaattcggtaggcggaggttgtcgtaagtagaattcgcgttattatattttagtttgggtaataagagggaaattttgttttaaaaaaaaaaaaaaaaaaaaagtttttatagttattaaaaaatttgtatttaaaaatagttgataaaaatattttttattaaaatagttgataaaaatatttttttgaggttaagtgtagttgtttatatttgttattttagtattttgggaggttgaagcgggaggatcgtttgattttaggagtttaagattaggttgggtaatataggaagatttcgtttttatatatatatagaaattttataaaaattagttgggtttggtggtatatatttgtggttttagttatttgggaggttgaggtaagtgaatcgtttgagtttaggggttttagggtgtagagagttatgattgtgttattggattttagtttcggtcgagcgatattttgtttgtttttttttttttttttttttttttagttttggatcgtataagaagggagataaggattattgataagatatggtatgtgatattaattagatttggtttttttttgttttgttttattagaggttggattttttttgttttagttttttcgttttttatagataaattttttgtttttcggatagttatttggtttgtttgttttttgtttttatttttttttgtttgtttttttgtttgaaaatttatgttgttttgttgttttcgttgggtttcgtttttatttttgttggaggagatttagttgataattttatagatttttttcgttttttttgtcgagttgattttttttttggaaattttattcgtagggaagggttagtgttcgtgtttgtttgtttgtttgttgtagttcgcgtaaagttgagcggttagggcgttgttgtttttttaaagtattattaaaaataatattttagtttttaagtaattttttgagtttgaattaaaagttggaagaattttttgggttttatgagtatttttgaatatgtttgattttatattttagaggttttaatatatttataattttggtttatagattttttatatttttttagttttaatttttgttttttttagaaataatttttaagtaggagagaatattgattggatttgatttttttagtttgggtagaggtttgtagatattttgtaggttgttagatttttcgtttagttatttgttagttgggggttatatggtatagaaagtagttatttttatgtaaggtattgtttgggtttgttttttttaaaggggtaggggatgcgggttggataaagggttcgtgattaagtaaagtattgtgatgatagttgttatttttatatttttttagatttgttttttaaattaaattttgattttttttttttaagttggagttattgttaattattgggagagttttagtagataaagttttatgtttttaggcgtttgtgtattttattttttttgtagagtagaattttttttttatttttgtgtttttggggacgttttattttttttttttagttggttttaaggttattatatcggtgaagtgttttattattattttttagaagaaattgagttttttagagaagttaagtgattttttgtatttatatttatatttaagaaaatttaattttataataattaaaaataaaaagtagaaaaaaatttataagtgatgagaaaaaaaaaaattaaaagttataaaaaataaatgaaaaaatgaaattaaaggaaaaaagattttttaaaaaagtaaaaaaaagaaaagaaatttaattttagagttttgatataaaatgttttaggtgttatttttaatgagagaaaagggacgtgaatttttaagtgattaagtgaatttttaagtaaatttgtcgtattagcgttttaggcggtttaaatattatacgttttcgattacggcggaatggagagaatgtgcgtatgttcggcgggaatttgcgtatgttcggagagaatttgcgtatgttcggtcggaatttgcgcgagttcggcgggaatttgcgtaagttcggcgggaatttgcgtatgtttagagtttcggggtacggttttttcgttttttttaggtttagtaggaaacgaagcggtttttttcgttatttgtcgtttgtttatcggaagcgagttgcgatacggtaggttttcgttcggaagaagcgattaaagcgtttgaggatcggtaatatggtgcggtcggggaataaggtataaagaaagttatggatttgggttttattcggattggggattcggagagggtggttcggaagtaggaatcgtgggatcgcggttaagataaagaatggggtaagagaagattatggtggtgggtttagttaggagggtcgggatcgagggatgcgttatgagaaaagttggagatttggggttttaagatttgaatttgagtttcgttgattttattttttttattatttatttattttattttttttttttttttttatttgttttttgttttatttgtttttttattcgttttttttttttttttttttattttattttattttttagttttattttttttattattttcgagtttgggtttttaagatttttatgagaatgaaaattagttgtgataaagtaattattttatagggtttgttgtaaaatttaagagagggattatttgtgattaaaataatttaaattgtaaagcgtcgtattattagttttataataacgtagtatttcgtatttattgaaagtttattttgtgagggacggatttaaattttttatttttattttatttaatttttataattttttgaagtgaaaattatttatttttattttgtaagtgggaaaatcgaggaataaagaattgtgggttttttttggtgaaattcggatttgaatttaagttgtttggttttagggttttggagaatttttgtgttgttagaaatttatgattattggtgttttagattagtaatagaaattataatgaattttaaagtgattttttttttttaatataaaagagtggtagttgtttttgaagggttattagagggagatgtggttttagggattaatgaatttatttaatatagataaataagatacgagtttgagtaattgatttttagtttttttaattttttattgagaaatgttgattaaaacgattatgaatttttaataatgttatttatttttttttttcgtttttttttagttgttgaaaattttgtagttttagtggaggagttgtttgttgtagatgaattggaagtaaaattttaatagtttgtattgtttcggtatagaaatgaagagttgttatgttatttagttttttttttttagtttttttattgttgttagataggaatttagaaatatagattattttgtttttagataataagttttatatttgaaattttttgatggtatttattggatatttaatttatgataaaagtgttttagttttttagagttttttggtttaaaagtagtttttgtgggtgtgtattaaataagtgtagtagtatattttgtgatttttaagtttttttaggttattatgttttaggtattgaaattgggatgtgtattttattgtttttaaaggaattttgtggtttattagtacgtttttttttttaaataatttaattttattttagaaattttttagtgtattgtgttgtttgtaaattagtgaaaaataattttttttttttatgtgttgtttgagatataattatatttagaaattatttataatttttttgataggaatttatttaggtttttaaaatatttttagggttaagagattatttaaaaaagagtagtttttttattgattatttttaaatgttattttttatttttcgtatggagtcgtattagtttttttgtaatttttatttgttgatttcgttgttttttttggtagattaatttttttatataatagttgttaaatatttggggggaggttagatacggtggtttatatttgtaattttagtattttgggaggcggaggtgggaggattgtttaagttaaggagtttgagattagtttgggtaatatagtgagattttaattttataaaaaaaatttaagaattagttgggtatggtggggtgtaattgtggttttagttatttggaaggttgaggtagcgggattatttgagttcgggagatggaggtagtagtgagttatgattatgttattgtattttagtttgggtgatagtgagattatgttttaaaaaaaaggaaaaaaaaatggtggggaggaaaattgttatgttttttttaatttttttatttgatttaaatatttagttatttttaattgttttttatattatgtattttttagatttttttttaagttgtttattttatgtttatttgtaattaatttttttggtaagatgttagtttagaattgtttatagtttgtttgatcggtataaagtattgcgagattattagttagagttaaggaatgtgaattttagaaaggattttaaattttatttagtttaatagttttttattttttagtattattaatagtgagattaagtgatatttttaaggatttagaattaatgggtaggagagatgggattagattttaggtttttcgattgttattatttttttttattagaagattttttttttttttttttgaatttattatattgttgatatagattaatatatttaggcgatgaagtaagataggtgtggggaatgtggtgtaaaagatattttacgttgttgattgattttataatttatattgaaattgtgagttgttattaatttaggttttttttagtttgtgtttaggtaaaatttggaagttaggtataaataattttatatgtattttttttaggttatgttttttttatttttttagttttttatatacgtgattgttatgtaatggtttgtgttttagtttatgtgatttcgtttgttatttatttgtttatatgattgatttttatttattaagatttatttaaggaagtttatatttaggaagttttttttgtttttttatcgttttggtattttttttattagttttgagtggatgttttttttgtgttttttagtgtttagtgtatatttttattatggaatattgttttggtattatttgttatttgtttgtgttttttattagaatagatttggtgtttttattttagattattagtttataaattgatttaaattgttagggtatattttttagtatatatatagattttagtagttattttttgtgataaaaatgttttataataaattatgttttaaattagtgatttatagtgaaagtatttgtttttatgtttgtaggtttgtaggttagttgtagtttgtttgatgtatattgggtataaatgggtttaattttggtttgtaggttggtattatatgtatttattatgggtttattttggggtttaggttaaagaagtggtagttatttggagtatgttttttttttggtagaaatttttgtagtttttagaaagtattaggattatttaagggttttttatagtgaaaatttatatgttttatatatatttttatgtagaatatattttttttttatattttttttaaatattgatataggtttatgaatataataagtaagggatatttttatagtttttttttacgatttatttttttaaatattttttggaattttgtttttagg

SEQ ID NO: 112 - DNA, 8607 bp, Artificial Sequence
  chemically treated genomic DNA (Homo sapiens)
tttggaaataaagttttaaagagtgtttgagaaaataagtcgtaagaaaagattgtaagaatgttttttgtttattgtatttatgaatttgtattagtatttaggaaaggtgtgaaaaagggatgtgttttatataagaatgtgtgtaagatatataaatttttattatggaaaatttttaaatagttttgatattttttaaaagttatagaagtttttattaggagaggaatatgttttagatagttgttatttttttggtttaagttttagaataaatttatgatgagtatatatgatgttaatttgtaggttagagttaaatttatttatgtttaatatatattagataaattgtagttgatttgtagatttataaatatgagaatagatgtttttattgtaagttattgatttggggtataatttgttatgaagtatttttgttataagaagtgattgttagaatttatatatatgttaagaggtatattttgataatttgagttagtttgtaaattgatgatttaaaataaagatattaaatttattttagtagaggatatagatagataataaataatattagaataatgttttatgatagaagtatgtattgggtattgagagatataggaggagtatttatttaagattggtggaggggatattagagcggtgaaggggtagaaaaggttttttgaatgtggatttttttgggtgagttttaatgagtaggagttaattatgtgaataagtaagtgatagacggaattatataagttaaggtataagttattatatagtaattacgtatgtaggagattaagaaaataagagaaatataatttaaaaggaatatatgtaaagttatttatatttggtttttaaattttatttgaatataagttggaagagatttggattgatggtaatttataattttagtgtgaattataaaattaattaataacgtgaaatgttttttgtattatattttttatatttattttattttatcgtttaaatatgttggtttgtattaatagtgtagtgaatttaagaagagaaaagaagggttttttggtgaaaaaagataatagtaatcgggagatttgggatttagttttattttttttatttattagttttgagtttttgggaatgttatttaattttattgttaataatattaaaaggtaggaaattgttggattagatgaggtttaaggttttttttggagtttatattttttgattttgattgatagtttcgtagtgttttgtatcgattaaataaattgtgagtagttttgggttaatattttattaggaaaattaattataaatgaatatgaaatgagtagtttagggaagaatttgaagaatatatgatgtaaagaatagttggaaataattagatatttaagttagatgagaagattaaagggaatataatagtttttttttttattatttttttttttttttttttgagatatggttttattgttatttaggttggagtatagtggtatgattatggtttattattgtttttatttttcgggtttaagtgatttcgttattttagttttttaaatagttgggattatagttgtattttattatgtttagttaatttttaaattttttttgtagagttggggttttattgtgttgtttaggttggttttaaattttttggtttaagtaatttttttattttcgttttttaaagtgttaggattataggtataggttatcgtgtttggtttttttttagatatttgataattgttgtataaaaggattggtttgttaagaaagataacgggattaatagatggaagttatagggagattgatgcgattttatacgagggataaaaaataatatttagaagtgattaataaagaaattatttttttttaagtgattttttgattttagaaatgttttaaaaatttgaatgaatttttattagggaagttatagatgatttttaaatgtggttatattttaggtaatatatgaaaagaaaagattattttttattagtttataaataatataatgtattaagagatttttgaagtaaaattagattatttgaaaaaaaaaacgtgttaataaattataaaatttttttgagaatagtaaaatgtatattttagttttaatgtttggggtatgataatttaaaaaaatttaagagttataaaatatgttgttgtatttatttgatatatatttataaaagttatttttaaattagaaaattttagaggattaaagtatttttgttatgaattaggtatttagtaagtgttattaaagggttttaaatatggaatttattgtttggaagtagaatggtttatatttttgagtttttatttggtagtagtaagaaaattgagaaagagaaattgggtagtatagtaattttttatttttatatcgaagtaatataggttgttagaattttatttttagtttatttgtaataaatagtttttttattagagttataaagtttttagtagttgaaagaggacgaaaaaaggaggtgagtggtattattaaaagtttatgatcgttttaattaatattttttaatgaggagttgagggaattagggattagttgtttaaattcgtattttgtttatttgtattgaataaatttattaatttttggaattatatttttttttagtgattttttagagataattattatttttttatgttgaaaaaaaaaaattattttaaaatttattgtaatttttgttattgatttgggatattaatggttatagatttttagtaatataggggttttttagggttttgaaattagatagtttggatttaaattcggattttattaggaaaagtttatagttttttatttttcggtttttttatttgtaaaatggggataaatagtttttattttaaggggttgtgaagattaaatgagataagaataaaaggtttagattcgttttttatagagtgggtttttaataaatgcgggatattacgttattataaagttaataatacgacgttttatagtttaagttattttagttatagatagttttttttttaagttttataataagttttgtgggatagttgttttattatagttaatttttatttttatagagattttaagaatttaggttcggaagtaatagaggaagtggggttagggagtggaatgggataaagagagagagaggggaggcgggtggggaggtaggtgagataaagagtaggtagagagggagaagagggatgggatgggtgggtaatggaagaggtggagttagcgaggtttaaatttaggttttggagttttaaatttttagttttttttatagcgtatttttcggtttcggtttttttgattgagtttattattatgatttttttttgttttattttttgttttgatcgcgattttacgatttttgttttcgaattatttttttcggatttttagttcgggtaaagtttaagtttatggttttttttatattttatttttcgatcgtattatgttgtcggtttttaggcgttttggtcgtttttttcgggcgggaatttgtcgtgtcgtaattcgttttcggtggataagcggtagatagcggaaagagtcgtttcgttttttgttaggtttgaaaggggcggggaaatcgtgtttcggaattttgagtatgcgtagattttcgtcgagtttgcgtagattttcgtcgagttcgcgtagatttcggtcgagtatgcgtagatttttttcgagtatgcgtagattttcgtcgagtatgcgtatattttttttatttcgtcgtagtcgggagcgtgtggtgtttgagtcgtttgaaacgttagtacgatagatttatttaaagatttatttaattatttaaagatttacgtttttttttttttattgagaataatatttaaggtattttgtgttagagttttggagttagatttttttttttttttttatttttttaaaaaatttttttttttttaattttatttttttatttattttttataatttttgattttttttttttttattatttgtgggtttttttttattttttatttttggttattgtggagttagatttttttgagtatgagtatgaatgtagaaagttatttaatttttttaaaagatttagttttttttaaaaagtgataatgaaatattttatcgatgtgataattttagagttaattggggaagaagagtaggacgtttttaggagtataaaagtagaagggagattttattttgtagagaaaatgggatgtataaacgtttggaggtatgagattttatttgttaaggtttttttagtagttagtagtggttttagtttggaagggaggagttaaggtttaatttagaagataagtttagggagatatagaaatagtagttgttattatagtgttttatttgattacgagttttttgtttagttcgtattttttatttttttgagggaggtaggtttaagtagtattttgtatagaaatgattgttttttatattatatgatttttagttgataggtggttggacgaagggtttggtaatttgtaaagtgtttgtaaatttttgtttaaattgagaaaattaagtttaattaatatttttttttgtttgaaaattgtttttgggaaaagtaagaattgaagttgaaaagatgtggagaatttatgagttaaaattataaatatattgaagtttttagaatgtagagttagatatatttagaggtgtttatagagtttaggaggtttttttagtttttgatttaaatttaaggagttatttaaaagttgaaatattatttttaataatattttaaaggaatagtagcgttttggtcgtttagttttgcgcgggttgtagtaggtaggtaggtaggtacggatattagtttttttttgcgggtaagatttttaagagaaagattagttcggtagaaggggcggggaagatttgtgaggttgttagttaaattttttttagtaaaggtggaaacgaagtttagcggaggtagtaggatagtataaatttttagataaagaagtaaataaggaaaaatgggagtaaagggtaaataggttaagtggttattcgggaaataaaagatttatttgtggaaagcggagaaattgaaataaggagagtttagtttttggtgaagtaggatagaaagaagttaaatttgattagtattatatattatattttgttagtggtttttgtttttttttttgtacgatttagagttagagagagagagaaaaggaaagaaatagatagggtgtcgttcggtcgaggttggagtttagtagtataattatagttttttgtattttggaatttttgggtttaagcgatttatttattttagttttttaggtagttgggattataggtgtgtgttattaagtttagttaatttttgtggggtttttgtgtgtgtgtggaggcggggtttttttatgttgtttagtttggttttgaatttttgggattaagcgattttttcgttttagttttttaaagtgttgggatgataggtgtgagtaattgtatttggttttagaggaatatttttattaattattttgataaggaatatttttattaattatttttaaatgtaagttttttagtagttgtagaaattttttttttttttttttttttgagatagagttttttttttgttgtttaggttggagtgtagtggcgcgaattttgtttacggtaattttcgtttgtcgggtttaagcgatttttttgttttagttttttaagtagttgggattataggtatgtgttattatatttagttaattttgtatttttagtagagatggggtttttttattttggttaggttggtttcgaattttcgattttaggtaattcgtttattttgattttttaaagtattgggattataggcgtgagtttgtgtttggttgaaatatttttaggaaggagggaattttattttattttatttttaaagtgtagtttttaaaaggtgaaataatttatttgtttgttgtttggtataattaggaaatattgaaatagtgaataatgggaggtttttattgttttcgaagttagtttaatattttttagggagagggtattttattttttatagtatagcgtatattaaatggtaatatagagttatagttatgtatttaatgtgttttgaaaattttaaattatttttatttttatgggtttttttagtagaattgttttttgaagaaaattattttttggttacgttgttattcgtgttaaaattgtgtgtagtttgtaatatttttggttgtgttagttttatttttttgataattttgttaatgtgttttgaaagattgaaaatttgagtgggtagagtatatgatattaaattgtgaattggtgggatttatgtaataatttattagtatgtggagataatgtattttgatattttttttttttttgagaatagttttattttgcgtttaggttggagtgtagtggtacgatttcggtttattataaattttcgtcgtttttattcgttattaggtttaagcgatttttttgcgttagtttattaagtagttgggattataggtatttattattgtgtcggttaatttttgtatttttagtagagacgggattttgttatgttggttaggttggtttcgaatttttgattttaggtgattcgtttattttagttttttaaagtgttgggattatagatgtgatttatcgcgtttagtttaaaaaatatttttaataagattggtaaagagaattattggagatttagtatagtgaaggaaatttgtatgttttatgtttatgtttttattttgtatatggtttttatttttttttttttttttttttttttttttttttttttttttttttttttttttttgtttttttttttttttttttttttgtttttttttttttttttttttttttttttttttgtttttattttttgttttttatatattttttagtataggtttgttttttggaagaaataaaagaggttttagtagttgtgtttgtttgtattttagttgtttttatagaagtttttagaattagttatttttgtgtagttaggtatttgtgacgttgaaaagggatatggattttaagtattgttttttttggtaaagggtttttattaattaagggttaagggataaatattattaatgatgtgatagtatatatggttatttttttttttttttataataaaaggattttggttttgttcgttttgtttttgttagtgtaaggtttttttggatttaaatgatatagaattgggaataaagggggataggaggttgatgggttatgattagtggtggtgatggtatgtgtgttgggggatagaagggggagttagagagaaatgtgtaaaagttattgtggtatatgagggaaataaatgggataggaaagggggaatggtaaaatgttattttggtgatgcgtgtgagttatgttttttagtatttatatttttatgtagtttttttttcgtgaatttggataggttttatgatttgttataattagtaaaatgtgtaggtatttatagaatagtaggtagttttgggttgaagtttttagaatatttggtagatttgttttttgtattttggtgaatttagatattatgtatgaagattgttatgttgtgaaagtttaatatagttatatgaaggagttttattatggattgagtgtgtttttttaaaatttatatgttgagattttaatttttaatgtgatgatatttggagatgaggtttttgggaggtgattagatttaggtaaagttatgagggtggtttttttgatggaattagtgtttttgtgaaaagaaataagagataaagggacgttagagagttcgttcgttttttttttttttttttttttttttttttttatttttttttttttttttttttttttatttatataaagagattatgtgaatatagagtgagaagatagttatttgtaatttaagaagagatttttttagtttttagaattgtgagaaaattaatttttgttatttaagttatttagtttatggtattatttgttatgatagtttaagtttgttatggtagtttaagtggattaatataagtattgagtattaatagttttaatagtaatttggatgttatttagtattaatttggtagttacgtaagtgaggttgtttagggagaagattttttttaggaagttattttagtattagaaatattgagtagattagtagtttttattaagttttgtataaattgtaaaattgtgagtaaaggaattgagtgattattttggtggggtttatttggttttgtttttgttttgagagaggattttattttgttatttaggttggagtgtagtagcgttattttagtttattgtaatttttatttttcgggtttaagttatttttt

SEQ ID NO: 113 - DNA, 13919 bp, Artificial Sequence
  chemically treated genomic DNA (Homo sapiens)
tttatttttgtatttttttggtagatacggggttttattgtattggttaggttggttttaaatttttggttttaaatgatttatttatttcggtttttcgaagtgttgggattataggcgtgagttatcgtatttagttttattgtttgattttgtttataaagttatattggtatgtaattttttttgtttatatattgtttatggttgtttttgtggtttagtggtagagttattgtaaagattttttttgttttttataggaaaagtatgttggttttagttatagggagtcgtggtagttgtggttatttagagaggacgttttagttattattgtagtttagttggtgttgttaggtagattatggatttaggtttagtttgtaaatattgttattttttttgatttttaagggaagtttgaaatttagattttttttttttttttttattgtgaatattttttttttttttttttttgagatagatttttattttgtcgtttaagttggagtgtagtggtataattttggtttattgtaatttttacgttttaggtttaagtaatttttttgttttagtttttcgagtaattgggattataggcgttcgttattatatttggttaattttttgtattttttaatagagatagggttttattgtattagttaggatggtttcgtttttttgattttatgatttgtttgtttcggttttttaaagtgttgggattataggtgtgagttattgagttcggttaaatattttaatttttaaatattagtttagtttttaaaagttaaattttagtaatttaagtaaaatatatttataggttagtttgttcgttattagtttgttttggtgggaaagataggaattttggaaatagatttgggtttttttagtttttggatatttttgggtaagttgtatgttttttggtgatttattttttttagttgtggtatggaaatatttcgtttttttagttgtgaggatcgacgagaattattagttaggtggaggggtttagtacggtgtttggtgtttggtaaatttttatttggtagttattgttgttatttatttatttatttattttatataataatttatttattgagagtttttttttttcgtttttgtagtttttaggttattttttttatttgtagattttgtgtttaagttttagaaagatggttgggggtaggggttttgcgtattattcgatgagatttataacgtggttgtaattgttttttttatattgtaagaatacggttggtagatttagtttttcgtatagtgtttttattcgggttattttttcggtttttttttgtttgtaatttttttttaggatttggtattgttttggagtggtttgtagtagatattgaattattagttagttgtatttgttgttttggaagttattgttaattttgttagttatattggggtttttaaagaagttaaggtaattattttgaatttgaaagaatttttgaatttttagtaggatttttttggtattggtgtgtttttttttgttatttatttttgatatgtatatggttgtagttataggaaggtagaaggagtagaaagttgttttgtatttgataatagatttgtgttttttttcggtgtatttgcgaagatttatattgttttggggggttgtgatgaggtcgagggtttgtttaattttagtttgataagaattttgttggaagagttttattaggtttaggtaatagggttgttttcggtaatatagttttagtaggtagtagatatatgtttttagaaggatagtattattgatggtatttaaatttatgtttagtttttgatattaggagatttgtttttggtaggtaagggatgaatttataatgttatttgttattaggaagaaagtttgtagtagttgcgtatattagtttatagtcggtgtttattggagattattagtatttagttttttcggttttattagttttcggaacgttattagtattattaaatttcggtgatatttgtttttaatggtattgtattttaggatttttttgagtcgggtagtagtattttttgtttttgggtgttttattttatttttagttagtattttaacgatttgggagtagtgttgaacgaaattttgttttgtttgggtataaatatttgatttttggtttttattcggttttttttttttttttttttttgagacggagttttgttttgtcgtttaggttggagtgtagtggcgcgattttggtttattgtaaattttattttttgggtttacgttatttttttgttttagtttttttagtagtcgggattataggtattcgttatcgcgtttggttaattttttgtatttttagtagagatagggttttattatgttagttacgatggtttcgattttttgatttcgtgattcgttcgttttggttttttaaagtgttgggattataggtgtgagttatcgcgtttagtttggtttttatttattttgagggaggagtaaagggttgtgtttttggatgcgggtttttgtttggttgttatttatttttgtttaaagagatagggtttcgttttgttgtttaggttggagtgtagtggtacgattatagtttattgtaattttgaatttttaggtttaaagtagtttttttgttttagttagttaaagtgttgggattataaggtgtgagttattgtattaggtttgttattattgttattattatatatttattgttgtttttattatttttttattttgttttttgggtaggttcgtaaattagggttttattttttgattggttgtaggtggttagattgtttttggttatttaggagttagtgggtttttggttttggagaagttggttgattataagggaattgtaggttattggggtcggtattatgggtgttttttggaaggttttgttttgatttatttttggaggttttagttagaagagttgttatttttttttcggttatttattgtgtaagagataaattatatgttagtttcgtgttattttttagtaagatgtgggaggtattggtttgagtgatttttttttaagtaaagttttatttcgtcgtgtttataggattattgttataggaatatggatggtttgtttttttatttttgtggagttcggggatggggggatgtgtttgttgttagggaggtgttatggtaagttgatagggtttgatgttagtgaaattatattgggatagtagtagttatttaaagtaataatggtaagatatagcggtggtggtggtttggtttatatttatgattttttaaaagtgtttggtatttttagggaggtttgttttttgttttgttttttgaggtttatgttgtttaggttggagtgtaatggtgtagttttcggtttattgtaatttttgttttttgggtttaggggattttattgttttagttttttaggtagttgggattataggtgtatgttattatgtttagttaatttttgtatttttagtagagacgggattttattatgttggttaggttggttttatatttttgattttagatgattcgttttttttagttttttaaagtgttggggattataggtatgagttattgtatttggttaggagagtttttttttgataatagaagtaatatttttttattttagaaaatgtgaaaagtttagatatataaggaagttaaataaaacgttttttatatatgaagaagaaaagaagtaagtttaaaaaaaaaaagaaaaaaaaaggttttttatcgtttttttatttaaagatagttgttaatattttattgatttttatggagtttgttttatgtttttgttttatgtaatagagatagtgttgtagtgaatagttttacgttaaaatttttttatgattttttgaagttagagttttaattattggattaaaggaagtgaatatttttaaattttttgatatatatattattaaattgtttgttttttcgttttttttaataaatagagatgggggtttttttgtgttgtttaggttggttttgattttttggttttaagcgatttttttttttttatttttcgagtagttaagattataggcgtgagttattatgtttagtcgttgattttaatttgaatgttttaaataaaatttttagtaaagtagaatatttttttgatatgtttgtgttaggatttgatttttttaggtttttggagaggttttttaataaggtatttttcgtgggtggttatttgttttgtgagaaggttatttttagttttaggttacgtatagtgtgttagttggtggggtgtggagttttaggtttaggttttttggaaagtgttcgaaagagaaacggtttagaaaataaggattttaacggtggtgtgggttgagtttggaaagtttagattatgttagtggaattagagttgggaagaggttttagaagttatttttttttattggtttttagtttatattttttagaatttttttattttgtagttaggtgtagtggtttatatttgtaattttagtatttgaggagatcgaggtgggtagattatttgaggttaggagtttgagattagttttggttaatatagcgaaatttcgtttttattaaaaatataaaaattagttaggtgtggtgtggtgtatatttgtagttttagttatttaggaggttgaggtatgagaattatttgagtttgggaggtagaggttgtagtaagttaagatcgtattattgtattttagtttgtgtgatggaaggagattttgttttaaagaaaagaatttatttattttgtaaaggagttttatggtttttttgaagaaaaataggaatggaggttatttttgtgttaaaaaataatattttatatttttgtgttttattttttttttttttttttttgagattgagttttatttttattgtttaggttggagtgtaatggcgcgatttcggtttattgtaatttttatttttcgggtttaagtaatttttttgttttagtttttttagtaggtgagattataggtatgtgttattacgttcggtaaattttgtatttttagtagagatggggtttttttatgttggttaggttggtttcgaattgtcgattttaggtgattcgtgtttggtttattttttttttttttttttttttttttttttttttttttttttttttttttttttaagagatagggttttgttatgttgtttagattggttttaaacgtttggttttaagtggtttttttattttggttttttaaaacgttgagattataggtgtgagttattacgtttggtttgttttatatgttgacggatagtatataattatatgtataagggtttttgtttgtaaaagtttggaaatttattttaattgttagaattataaaatttagagaaggggatataattgttttgtggttatttagtagtttttattttttttcgcgacggtagaggtaggatagttagtattttggtgaggattgaaggattagttgtaagagattttagtaggtttgtagtgattagatgggttttttatatattgttaagttgaaagtagtcgtggtttagtatgagttgagtatttgtttaaaatttgtatttaaagttttttttttagaggttataattgtagtgagatttaagtgtgtggtttattcgtttcggggtttatagttgggtagggtgatttttatttaaatttttgtgttagtgtagattttgttttaaagtttttttaaatgtttggagattagaaagatttttggatattttttttttttttttttggatgaaattttatttttagtagaatagtagtattttatggtgttttagttacgattttttggagagagatttgcggcgaagatttgacgagagattgtaaaggaaaagtagggtttgttttttttggttaaagttgttaatattaaaaaaaaagaagaaaaaaaaattttggttaggtgtagtggtttacgtttgtaattttagtattttggaaggttaaggtaggtggattatttgaggttaggagttcgagattagtttggttaatatggtgaagtttcgtttttattaaatataaaaaaaaaaaattagtcgggtttggtggtgggtgtttgtaattttagttatttggaaggttgaggtagaagaatcgtttgaattcgggaggcggaggttgtagtgagtcgagattacgttattgtattttagtttgggtaataagaatgaaattttgttttaaaaataaaaataaaaataaaaaaaattttttgattattaaaaagttatatgattattttagaatatttgtaagtatagaaagaggtaaagaaagaatagtttaggtgtagtggtttatatttgtaattttagtattttgggaggttgaggcgggtggattatttgaggttaggagtttgagattaatttggttaatgtggtaaaattatatttttattgaaaatataaaaattagttaggcgtagtggtgcgtgtttgtaattttaattatttgggaggttgtagtaggagaattgtttgaattcgggaggcggaggttgtagtgagttaaaattgtattgttgtatttttgtttggcgatagagtaagatttttttttaaaaataaaaaaaagaaaaaaaattttataattttttgattttagtgatattttagtgttgttttttttagatttttaatttttaattaatttatttttatgagatagggtttttgtttgttatttaggttggagtgtagtggtgtaattatggtttattgttgttttaatttttagggtttaagtaatttttttattttagttttttgagtagttgatattataggtacgtattattataaatggttaatttttttagtttttgtaaagataggtttttgttgtgttgtttacgttggttttgtatttttgggtttaagcgattcgttcgtttcggttttttaaagtgttgggattataagtatgagttatcgcgtttggtttttttttttattttttaagattgatttgtattttattattagaatgttttataattggtgtaagaatttttttattgtaaagtgtttaggttgtttttaaattgaggtttttttttatggttaattataatattaataatttttataatgaagaatcggtattattaggagttggaataaattaggtttttaagttgtagttaagtgatggttaagtcgaggttgttgtagagattggtgtatcgatacgttattgtattgtgtataattgttgggtttaaggggaacgtagtgggcgtttttgggtagtgatttaaaggtgtttgtgttttcggagtagaaggtttattttttttttggtgttttagagtttttgggatattgggtatttgaagaattgtagtcgtagttttgtttttagggagtttttgttttggtggggagaaggttattgaaattagggagtgcggttgtgtttgcgtaagtgttttgcgtcgtgtatataagggtaggtggagttagtcgtttttggtaagttgtgggttagggggtttaggagaaggggatattatggttggatttgggaggatgggcgtgtttgtttgggggttggtatagagggaggattaattgttagaaggtggtaagtggtttggaatgttttggaattttttagaattagatgtgggtattaaaggtggcgggtttggtgtgagtaggaatagtggttggttatggaggggtttgtgtgttttgttattttttggagtttttagtatttttttagggtttgggttatggcgcgttttttattggggaggttgcgtgttttcgtggaaagttttagttgaagttttcgtttgtattttttaggtcgttttgtagagttgtgagagttggtttatcgggttatgaggatatgttgggatatatttcgtgtgtcgatgatggaggcggtcgtggttgttcgagagatgcgtgatatttaggagtaattggtttggaaggtagttttttgatttgtattttattgtggttatagaaatttttaattgaagatattgagttgaattatttcgttcgttcgttcgtttgttcgttcgagggtattttaggtttgatttttggggcgggttgtgggtttttgtcggaggaattggtagtttcgtggcgggtttggtatttatagagttgttaatttttgtgttcggagttgttgtaggtttgatttatttgtgtttttatgttgtgtatttagggttgtttttgtggtcgtttttttttgagattgaaagggtgggtaagtgttaggggtgaggggttaggagaggtagggaggttaagatgggttgattttttgttgtatgtttagtgttgtgtgggtattttatatatattcgtttgtgttatttttatgaaaaatatttaggatatatgttgataattgtatttttttaaagaaagtaagtttggcgagtttagatatttttattaagatgatataatagttaggtatggtggcgcgtgtttgtagttttagttgggtgatagagggagatttttgtttttataaaaaattaagagattagttgagtatggtggtatatgtttgtagttttagttgttcgggaggtggaggtaggaggatggttttagtttaggaggttatggggttgtagtgagtggtgattgcggttattgtattttagtttgggtgatagagtgagattcggattttaaataaataaataaatgaataaataaataaatgttattttttattaagtagtgtatgtgtgattttgagttatttaattaaggttatatatatacgattaagaggtagtatagagaataaatttaggtcgggtttggttttaaggtttatttttttagttaggagggtttagtttgagttttattttgggttttatttataggttttgtttaaagagggggaaaggaaaaggagagaacgattttcgttttttaagtattatatatttttattgtgataatacgtttatgaaggattttggttagtagggtttttattgatataatttggtgattttcgagtatatatattatattttatttttattttgttaatgaggaaattgagatttaggtagttatagtgacgtttttatagttacgtggtttgtgataagatggggattttggtttttggtgtggttttagattgtattattttagtaaggttttagtgagaagggtaagattattttttttggaagggagatagatgtggagtagtatttggaaagaagtaggtttgggttttggtattagtgtgtatatatattgtattagttttgattttttttttttttttttttttgtagaggtgggattttttgttattgaggttggagtgttttgggattatagtttattgtagtttttaatttttgggtttaagttatttttttgttttagttttttgagtagttgggattattggtatgtattttcgtatttggttaatttttaaattttttgtagagatgggattttattatgttgtttaggttggttttaaatttttgtgtttaaattatttttttgtcgtagtttttttaaatattggtattataggtgtgagttattatatttagtttttttgattttttttagttttggttttttgttcgtaagtgggagaaatgttattttggtagtttgtgtagtttaggagagataagtatatttgatgttggttattaaatgttggattttggatcggtattttaatagttagtgttttggggggtagttattaggtggggtatttgtaggtttttttttatttagatagttttaggtgttgagcggaattattgtttatatttattttgttattttgaagcggtgtgtagaatattttagaatatttattacgtggtatgtttttgttgggtttcggtgatgtagttgtgaatgaagtaggtttggggttgttgttatttggggaggagtagaaggattgtggttatagttatacgtggacgcggttattagggttttggtgggtgttgtggagggtgtagagggcgtgtgatgggttattttgagcgatgtaagttgggtttggaggacgtggagtgttcgtaagggaagagggtgggttggagtgattgtaaggagaaggtttcgggtggtggagttcgggatgtggggaagagttttttgggtttggtggtcggttagtaggggttaggtcggggagtgggtgtagagagttttggagaggttagagaggggtgattcggtgtttatttagggttttttttttggttagcgatgttttagggtatttgggagatatgaggagttagaatttgtgttgtagtttttagttttgtttttgttttttgggtgttttaaattttgtttttttttaagaaatgttgggtttttatttttaggatggtgggtgttaatagggaggttgaggtgggtggattatttgaggttaggagtttgagattagtttggttaatatggtgaaatttcgattttattaaaaatataaaaaattagttgggcgtagtggtgtatgtttgtagttttagttattcgggaggttgaggtaggagaattatttgaatttattcgggaggtggaggttgtagtgagtcgagattatacgtttgggtgataagagtgaaattttattttaaagaaaaaaaaatatatgtatgatgaaatatattaagtagttgggttagaggggaattattagtagtaagaaagaagttgggttggtgattagtattcggaatttatgttttttttttttatgggtttgtgcggtggtacgtaggttgcgggattgattttgaattttttttggttgttatagtaaagagataggattaggtttttgatttatgatgtttttaaggtgttaggggaagaaaagtaagcgtgagattaggcgcggtggtttatatttgtgattttagtatttgggaaggttgaggcgagtttattttttgaggttaggagtttgagattagtttgggtaatatagatattatttttataaaaagtaaaaaaatgagttgggtgtggtggtgaatgtttattgttttagttgttttggaggttgagttgtgaggattgtttgagattaggagtttgaggttgttgtgagttaagattatattgttgtattttagtttgggtgagagagtgagattttgtaattaaaaaaaaaaaaaaaattagttgtggaaaagtattacgtgttttttttgcgttgaggttgattttgtagggttattgatgtgtattggtaattgtttatgtttgttttgtttatagatttgtcggaggcgttgggtaatgatttcgggattttaggttagaggggtttgaagttgtttgggaaagtagcgggattttttgggaagatggttatggttttaagtttttttttggtgtaggtgtatattagtttcgtagttgtggttatggtaggatgggttgggtatttggtatttttatagtgttattatttgtagttttatcgagtagtagtttgtttagtagaagggttaacgttttgggtttgggagtttggtttatagtatttttttgggttaggtagatttttcgttggttcgttatattattgatttttttagttggatttagtttcgttaggatatcggtaagacgttgtttgtttttcgtatatatttgggcgtcgtatttgtttttttataggttttgcgttaggtgttggggtgatggacgtgatttatagagtttttgttttttttttgtagtatacgtggtggtgggtgggtgtagtgagtgggaatatttatataggttgagtgtagtttatagtgggagaggtattgtgggaggtttttttttttgttttgtaaagtagaaatgtttgtttcgattatagaggttgaagggtttttttggtcggtaggttagtatggaggtggtgcgttataggagtttagagggttttgttttattatttagtggttgtgtgttttgggtaggtaattgcgtttttttgcgtgtgtgcgtttttgttttttggtttgcgatgtgttttgatttttttttttttttttttttttttttttttgagacggagtttggttttgttgtttaggttggagtgtagtggtgtaatttcggtttattgtaatttttgttttttgggtttaagtgatttttttgttttagttttttgagtagttgggattatagatattcgttattatatttggttaatttttgtatttttagtagagacggggttttgttacgttggttaggttggtgtcgagtttttgattttaggtgatttgtttgtttcggttttttaaagtgttgggattataagtatgagttatcgtatttggatttgtagtgtgttttgattagtattattgagaatgaggtattagttttttttttgagttattttttattttaatttggtggttgttattgggggtgattttgttttcggggttatttgataatgtttggagatattgttggttgttatagttgagtgggtgggaggtgggggtgtttttggtatttggtgggtggaggttagggatgttgttcgttatttcggtagtgtattgggttggttttgtagtaaggaattattggtttatagtgttattagtgaggaaatttgagaaattggttttttttttttttttttaattttaattttagttttattttaaaaagtatgggttttttttatcgtgtttgtttgtttgtttgtttgttttttgtaaagattgggtttttatcgttttgtgttgtttaggttggtttttaatttttgagtttaagtgatttttttgttttggttttcgaaagtgttgggattataggtttgagtcgttatgtttagttttggaaattgtgtttttaggagtgtcgtagagtttgtgaaaattgtggttgttagttagtttttaagttattgtttttatagtgtgtgaagttaattgataaagatagtagataggataaataataatatggaaattgtatatcgtggtagagagtaggaagtgttaatcggggaatgaaagtggtaggtgttgtagaggtcgatttgaagttaggtgggtgtggtgttatgtgtttgtagttttagttatttaggaggttaaggtaggaggatcgtttgagtttaggaggttagggtggtagtgaattatgattatattattgtattgtagtttgggtgataaaggggtattttgtttttaataataaataaataaataaatagtagtatgattgtgtatttattgtgtttttatttgtttattttggcggttgaaaaaagaatttgaacgttttttgtattttggggatgttagtagattaatttttggtttttttttgaaaataggtattacgcggattgtgcggagatatttgtttttttagtatttagtttttggtcgaggtgtcgtttgggagtggttgagcgacgatggtttttggatcgtttatgaagtcggcgtttgtgacgatttggagtagtaggtggttaggggtaattagttcgtggatttggtttttttggggtataattatattgttaattatattatttatacgtagattaataagatttttagtttttgttgtagcgtgcggcgttaagtagggtcgttttatttagtgattattattatcgtttcgtcgggttatataggcgtcgtttgtttttgttatt

SEQ ID NO: 114 - DNA, 13919 bp, Artificial Sequence
  chemically treated genomic DNA (Homo sapiens)
ggtggtaagagtaggcgacgtttgtgtggttcggcggagcgatgatggtggttattgggtaaggcggttttgtttggcgtcgtacgttgtagtagaagttggaagttttgttggtttgcgtgtgggtggtgtagttgatagtgtagttgtattttaggggggttaagtttacgagttggttgtttttggttatttgttgttttagatcgttatagacgtcggttttataggcggtttaggagttatcgtcgtttagttatttttagacgatatttcggttaggggttgagtgttgggggaataggtgttttcgtatagttcgcgtggtgtttgtttttaaaggaaaattaaaggttagtttgttagtatttttaagatatagggaacgtttaaattttttttttaatcgttaaaataaataaataggaatatagtaggtatatagttatgttgttatttgtttatttatttattgttagaggtagggtatttttttgttatttaggttgtagtgtagtgatgtgattatagtttattgttattttgattttttgggtttaagcgatttttttgttttagttttttaaataattgggattataggtatatgatattatatttatttaattttaaatcgatttttataatatttgttatttttatttttcgattaatattttttgttttttgttacgatatgtaatttttatgttattatttattttgtttgttatttttgttagttgattttatatattgtgaaggtaatgatttgggagttgattgatagttatagtttttatagattttacgatatttttggaaatatagtttttagggttgggtatgacggtttaagtttgtaattttaatattttcggaggttaaggtaggaggattatttgagtttaggagttgaagattagtttgggtaatatagggcgatggagatttagtttttataaaaaataaataaataaataaataaatacgataaaaaaaatttatattttttaaaataaaattaaaattaaaattgaaaaaaaaaaggaaaaattagttttttaagtttttttattggtgatattgtgggttaataattttttattgtagggttagtttagtgtattgtcgggatggcgagtagtatttttggtttttatttattagatgttaggagtatttttattttttatttatttagttgtaataattaatagtgtttttaaatattgttagatggtttcggggataaaattatttttagtgataattattagattagagtaagggatggtttagagaggaaattggtgttttatttttaataatattgattaaaatatattgtaggtttaggtgcggtggtttatgtttgtaattttagtattttgggaggtcgaggtaggtagattatttgaggttaggagttcgatattagtttggttaacgtggtaaaatttcgtttttattaaaaatataaaaattagttaggtgtggtggcggatgtttataattttagttatttaggaggttgaggtaggagaattatttgaatttaggaggtaggggttgtagtgagtcgagattgtattattgtattttagtttgggtaatagagttagatttcgttttaaaaaaaaaaaaaaaaaaaaaaaaaaaaagattaaaatatatcgtagattaaaaagtagaaacgtatatacgtagaggggcgtagttgtttgtttagggtatatagttattgagtggtgggatagggttttttgaatttttatgacgtattatttttatgttggtttgtcggttaaaggaattttttaatttttgtggtcggaataggtatttttgttttgtaagataaggggaagggttttttatagtgttttttttattgtgagttgtatttaatttatgtggatgtttttatttattgtatttatttattattacgtgtgttgtagggagagagtagaagttttgtaagttacgtttattattttaatatttggcgtagagtttgtgggaaagtaggtgcggcgtttagatatgtgcgagaggtagatagcgttttatcggtgttttggcggaattgggtttagttggggaggttaataatgtaacggattagcgaggggtttgtttggtttaaggggatgttgtgggttaggtttttaagtttaaaacgttggtttttttgttggataaattgttgttcgatgaagttgtagatggtggtattgtaggggtgttaggtgtttagtttattttgttatagttatagttgcggggttggtgtatatttgtattagggaagggtttggggttatgattatttttttaaggagtttcgttgtttttttaaatagttttagatttttttggtttggagtttcggggttattgtttagcgttttcggtagatttgtgaataggatagatatgagtagttattaatgtatattagtagttttgtagagttagttttagcgtaggggaaatacgtgatgtttttttatagttgattttttttttttttttggttatagggttttatttttttatttaggttagagtgtagtagtgtgattttggtttatagtagttttaaatttttggttttaagtaatttttataatttagtttttagagtagttggaataataggtatttattattatatttagtttatttttttattttttgtagagatgatgtttgtgttgtttaggttggttttaaatttttagttttaagggatagattcgttttagtttttttaagtgttgggattataggtgtgagttatcgcgtttggttttacgtttgtttttttttttttaatattttaagggtattatgaattaagaatttgattttgtttttttgttgtggtagttaggaagaatttaaagttaatttcgtagtttacgtattatcgtataggtttatgaagaaagagagtataaatttcgggtgttagttattagtttagttttttttttgttattgataatttttttttgatttaattgtttagtgtgttttattatgtatgtatttttttttttttgagatggagttttatttttgttatttaggcgtgtgatttcggtttattgtaatttttatttttcgggtaggtttaagtgatttttttgttttagtttttcgagtagttaggattataggtatgtattattgcgtttagttaattttttgtatttttagtagagtcggggttttattatgttggttaggttggttttaaatttttgattttaggtgatttatttattttagtttttttattagtatttattattttgaagatgagaatttaatattttttggaaaggagtagggtttgggatatttagggagtaggggtagagttgggaattgtaatataggttttagttttttatgttttttaggtgttttgaagtatcgttaattaaaaaggaagttttagatgggtatcgaattatttttttttggtttttttaaggttttttgtatttatttttcgatttggtttttgttgatcggttattaggtttagggagtttttttttatatttcgagttttattattcgagattttttttttgtagttattttagtttattttttttttttgcgaatattttacgttttttaggtttagtttgtatcgtttaggatgatttattatacgttttttgtattttttatagtatttattagaattttagtaatcgcgtttacgtgtggttgtgattatagtttttttgtttttttttaggtggtagtaattttaagtttgttttatttatagttgtattatcgggatttagtaggggtatgttacgtggtgagtgttttagaatgttttatatatcgttttagaatgatagagtgaatgtggataatgatttcgtttagtatttggagttgtttgaataagaagaggtttgtaaatgttttatttgatggttgttttttagggtattggttgttggagtgtcggtttagggtttaatatttagtaattaatattaaatgtatttgttttttttaagttgtatagattgttaaggtgatattttttttatttacggataggaaattaaggttgaaagaggttaaggggattgggtgtggtggtttatatttgtaatgttagtgtttagggaggttgcgataggagggtggtttgagtataggagtttgaggttagtttgggtaatatagtgagattttatttttgtagaaaatttaaaagttagttaggtgcggaggtgtatgttaatagttttagttatttaagaggttgaggtaggaggatggtttgagtttaggagttagaggttgtagtgagttataattttaaggtattttagttttagtgataagaggttttatttttataaaaaaaaaaaaaaaaaaaaaattagagttgatgtagtgtgtgtgtatattgatgttagagtttaggtttgtttttttttaggtgttgttttatatttgttttttttttagggaaggtggttttattttttttattgaaattttgttggggtagtatagtttgggattatattagaagttagggtttttattttattataagttacgtgattatgaggacgttattgtaattatttgggttttagtttttttattggtaaaatggggataaaatatgatgtgtatgttcgggaattattagattgtattagtgggggttttattggttagggttttttatgggcgtgttgttataatgagggtgtatagtgtttgagagacgagggtcgtttttttttttttttttttttttttttaagtagggtttgtaagtgaagtttaaggtaaagtttagattgagtttttttagttaagaaaatgggttttagagttagattcgatttgggtttgttttttgtgttgttttttagtcgtgtatgtgtgattttggttgaataatttaaggttatatatatattatttaataaaaggtgatatttatttatttatttatttatttatttatttagagttcgagttttattttgttatttaggttagagtgtagtggtcgtaattattatttattgtagttttatggttttttgggttaaagttatttttttgtttttatttttcgagtagttgggattataggtatgtgttattatatttaattgattttttaattttttgtagagataggggtttttttttgttatttagttgagattataggtacgcgttattatgtttggttattgtattattttgatggaagtatttaagttcgttaagtttgttttttttgggaaaatgtagttattaatatgtattttaagtgttttttatgaggataatatagacgggtgtgtataaggtgtttatatagtattaggtatatagtagagagttaatttattttggtttttttgttttttttggttttttatttttagtatttgtttatttttttagttttaaggaggaacggttataagggtagttttgagtatatagtatgagaatataggtgagttaggtttgtaataatttcgaatataggaattggtagttttgtgggtgttaggttcgttacggagttgttaattttttcgataaaagtttataattcgttttaaagattagatttggagtgttttcgggcgggtaggcgggcgggcgggcggaatggtttagtttagtgtttttaattggaagtttttgtaattataatgaggtataaattagaggattgttttttaagttaattatttttgggtgttacgtatttttcgggtagttacggtcgtttttattatcggtatacggggtatgttttaatatgtttttatggttcgatgaattaatttttataattttgtaaaacggtttgggaaatataggcgaggattttagttaaaattttttacgaaggtacgtagtttttttaatggagggcgcgttatggtttaggttttaggagggtattggagattttagaggatgataaggtatataagtttttttatgattagttattgtttttatttatattaagttcgttatttttgatatttatatttaattttagaaagttttagaatattttaagttatttattattttttagtaattgattttttttttatattagtttttaagtaaatacgtttatttttttagatttaattatggtattttttttttttgggttttttgatttatagtttgttagagacggttggttttatttatttttgtgtgtacggcgtagggtatttacgtaaatataatcgtattttttggttttagtggttttttttttattaaaatagaaattttttgagggtagagttgcggttgtagttttttaggtgtttaatattttagaggttttgaaatattaaaggaggggtgagttttttgtttcgggggtataggtatttttgagttattgtttagaaacgtttattgcgttttttttgaatttagtaattatgtataatatagtggcgtgtcggtgtattagtttttgtagtagtttcggtttaattattatttagttgtagtttaaaaatttaatttgttttagtttttaatgatgtcggttttttattatgaaaattattagtattataattggttatgggaaaaagttttaatttggaggtagtttaaatattttataataaaggaatttttgtattaattatggaatattttaatgatggaatataaattagttttaaaaaatgaaagaaagggttaggcgcggtggtttatgtttgtaattttagtattttgggaggtcgaggcgggcggatcgtttgagtttagaaatataagattagcgtgggtaatatagtaaaagtttgtttttataaaaattagaaaaattagttatttgtggtggtgcgtgtttgtagtattagttatttaggaggttgaggtgggaggattgtttgagttttggaggttgaggtagtagtgaattatgattgtattattgtattttagtttgggtgatagatagagattttgttttataaaaataaattaattaaaaattaaaagtttggaaagaataatattaaaatgttattggaattaaagaattatgggatttttttttttttttttatttttgagaaggagttttgttttgtcgttaggtaggagtgtagtagtgtaattttggtttattgtaattttcgtttttcgggtttaagtagtttttttgttgtagttttttaagtagttgggattataggtacgtattattacgtttggttaatttttgtatttttagtagagatgtggttttgttatattggttaggttggttttaaatttttgattttaagtgatttattcgttttagttttttaaagtgttgggattataggtgtgagttattgtatttgggttattttttttttatttttttttgtatttgtaaatgttttaaaatagttatataattttttaatgattaaagggttttttttgtttttgtttttgtttttgagatagagttttatttttgttgtttaggttggagtgtaatggcgtgatttcggtttattgtaattttcgtttttcgggtttaagcgatttttttgttttagttttttaagtagttgggattataggtatttattattaagttcggttaattttttttttttgtatttagtagagacggggttttattatgttggttaggttggtttcgaatttttgattttaggtgatttatttgttttggttttttaaagtgttgggattataggcgtgagttattgtatttggttaaagttttttttttttttttttttttagtattaataattttgattaggaaaaataaattttgttttttttttatagtttttcgttaggttttcgtcgtaaatttttttttagaggatcgtggttgaggtattatggaatgttgttgttttattggagatgaaattttatttaaaagaaaaagggaaaagtatttaaaagtttttttagtttttaggtatttagaaaagttttagaataagatttgtattggtataagaatttgagtggaaattattttgtttagttgtgagtttcggggcgggtgagttatatatttggattttattgtagttgtggtttttgggaagaaggttttgaatgtagattttaaataggtatttaatttatattgagttacggttatttttaatttaataatatgtgagaaatttatttgattattgtagatttgttgaaattttttataattaattttttaatttttattagaatgttggttgttttgtttttgtcgtcgcgagagaagataaaagttattgggtggttatagggtagttatgtttttttttttaggttttgtgattttggtagttagaatgggtttttagatttttataagtagaaatttttatatatgtgattatatgttgttcgttaatatgtaaaataggttaagcgtggtgatttatatttgtaattttaacgttttgggaggttaaggtgggaggattatttgaggttaggcgtttgagattagtttgggtaatatagtaagattttattttttaaaaaaaaaaaaaaaaagaaagaaagaaaagaaaaagaaaaagaaaaaaaaaagtaagttaggtacggattatttgaggtcggtagttcgagattagtttgattaatatggagaaattttatttttattaaaaatataaaatttgtcgggcgtggtggtatatgtttgtaattttatttattagggaggttgaggtaggagaattgtttgaattcgggaggtggaggttgtagtgagtcgagatcgcgttattgtattttagtttgggtaataagagtgaaatttagttttaaaaaaaaaaaaaaaaaaagtgaaatatagaaatgtgggatgttgttttttgatatagaggtggtttttatttttatttttttttaagagaattatgaagtttttttgtaaaataggtgagtttttttttttgagatagagtttttttttattatataggttggagtgtagtggtgcgattttggtttattgtaatttttgttttttaggtttaagtgatttttatgttttagttttttgagtagttggaattataggtgtgtattatattatatttggttaatttttgtatttttagtagaaacggggtttcgttatgttggttagggttggttttaaatttttggttttaagtgatttgtttatttcggtttttttaagtgttaggattatagatgtgagttattgtatttgattgtaaaatgggagagttttgagaagtgtggattggaaattagtgagaggaggtaatttttagaatttttttttagttttgattttattaatatggtttaaattttttaaatttaatttatattatcgttaaagtttttattttttaagtcgtttttttttcgggtattttttaggaggtttgggtttgaaattttatattttattagttgatatattgtgcgtgatttggaattagaaatgatttttttatagggtagatggttatttacgggggatgttttgttagaaagtttttttaaagatttgggagagttaaattttgatataaatatattaaagaaatgttttattttattagaaattttgtttaaaatatttaagttaaaattagcggttgagtatggtggtttacgtttataattttagttattcgggaggtggagggaagaggatcgtttgaggttaggaggttaagattagtttgggtaatatagagagatttttatttttatttattaaaaaaaacggaaaagtaaataatttggtaatatatgtattaagaggtttaaaaatgtttattttttttgatttaataattaagattttaattttagaaaattatagaaaaattttgacgtgaagttatttattatagtattgtttttattatataaaatagaagtatagggtaaattttatagaagttaataaaatgttaatagttgtttttgagtggagaaacgatagaagatttttttttttttttttttttttaaatttgtttttttttttttttatatataggagacgttttgtttgatttttttatatatttgaattttttatattttttaaagtgagaaagtattatttttattattagaaaaaaatttttttggttaggtgtagtggtttatgtttgtaatttttagtattttggaaggttgaggggggcggattatttgaggttaggagtatgagattagtttggttaatatggtgaaatttcgtttttattaaaaatataaaaattagttgggtatggtggtatgtatttgtaattttagttatttgggaggttgaggtagtagaattttttgaatttaggaggtagaggttgtagtgagtcgagaattgtattattgtattttagtttgggtaatatgagttttaaaaaataaaataaaaaataaatttttttgaaaatgttaaatatttttaaaaggttataaatataaattaaattattattatcgttgtgttttattattattattttaaatggttgttgttattttagtgtagttttattaatattaggttttgttaatttattatggtatttttttgataatagatatatttttttattttcgagttttataaaaatggaagaataaattatttatgtttttatgatagtagttttgtgagtacggcgagatggggttttgtttgaaaagggattatttaggttagtgttttttatattttattggaagatggtacgaaattagtatgtgatttgttttttgtatagtgggtggtcggaagggaagtgataatttttttggttggggtttttagggataggttagagtagaattttttaaagggtatttatggtgtcggttttagtaatttataatttttttgtggttaattagtttttttagaattaagaatttattggtttttgggtagttaagagtaatttgattatttgtagttagttagaaggtggagttttggtttacgggtttatttagagggtaaagtaggggagtaataggggtagtagtggatgtgtaatggtaatagtaatagtaggtttggtgtagtggtttatattttgtgattttagtattttgattggttgaggtagaaggattgttttgagtttaggggtttaaagttgtagtgagttatgatcgtgttattatattttaatttgggtaatagagcgagattttgtttttttaaataaaaataaataatagttaagtaggaattcgtatttaggaatatagttttttgttttttttttagaatgaatggaaattaggttgggcgcggtggtttatatttgtaattttagtattttgggaggttaaggcgggcggattacgaggttaggagatcgagattatcgtggttaatatggtgaaattttgtttttattaaaaatataaaaaattagttaggcgcggtggcgggtgtttgtagtttcggttattagggaggttgaggtaggagaatggcgtgaatttaggaagtggagtttgtagtgagttaagatcgcgttattgtattttagtttgggcgatagagtaagatttcgttttaaaaaaaaaaaaaaaaaaaagatcgaatggaaattagaaattagatatttatgtttaagtaaagtaggatttcgtttagtattatttttagatcgttagggtgttgattgaggatgagatggggtatttagagataggagatgttattgttcggtttaaggaggttttggagtataatgttattggaggtaagtattatcgaggtttgatggtgttagtagcgtttcgggagttggtggagtcgaggaaattggatgttgatagtttttagtgggtatcgattgtgggttggtatgcgtaattgttgtaagttttttttttggtggtagatgatattatggatttattttttatttgttagggatagattttttggtattagaagttgggtatgggtttggatgttattaatgatgttatttttttggaagtatgtatttattgtttgttgaagttgtattgtcgggagtagttttattatttgaatttgatggagtttttttagtagaatttttattagattgagattgggtagattttcgattttattataattttttagggtaatgtggattttcgtagatgtatcgaaaaaaggtataaatttgttgttaagtataagatagttttttattttttttatttttttgtagttgtagttatgtatatgttaagaatggatgataagaaggagtatattagtgttaagaagattttgttggagatttaagagtttttttagatttaggatgattattttgatttttttggggattttagtgtgattggtagagttggtaatgatttttaggataataaatgtagttggttggtggtttagtgtttgttataggttattttagaatagtattagattttgaaggaaaattataggtagaaggaggtcgagaaggtggttcgggtgaaggtattatacgaggagttggatttgttagtcgtgtttttgtagtatgagaaagatagttatagttacgttatgggttttatcgaatagtacgtagagtttttgtttttagttatttttttggggtttgggtataaaatttataagtggaaaaagtgatttagagattgtaagggcggggagagaaggtttttaataagtaaattattgtgtaaaataaataaataaatgaataatagtaatggttattaggtaaaggtttattaggtattaggtatcgtgttaagtttttttatttgattagtaattttcgtcggtttttataattggggaagcgggatatttttatattataattgagaaaagtgagttattagaagatatgtagtttgtttaaggatatttaggggttgagaaaatttaaatttgtttttagagtttttgttttttttattaagatagattgatgacggataaattggtttgtagatgtgttttgtttgggttattaaggtttggtttttaaaaattgagttgatgtttaaaaattggaatatttggtcgggtttagtggtttatatttgtaattttagtattttgggaggtcgaggtaggtagattatgaggttaggagagcgagattattttggttaatgtagtgaaattttgtttttattaaaaaatataaaaaattagttaagtgtggtggcgagcgtttgtagttttagttattcgggaggttgaagtaggagaattgtttgaatttaagacgtggaggttgtagtgagttaagattatgttattgtattttagtttgggcgatagagtgagaatttgttttaaaaaaaaaaaaaaaaggaatatttatagtaaaaaaaaaaaaaaaaaatttagattttaagttttttttgaaaattagaaaagatggtaatatttgtaggttggatttagatttatgatttatttagtaatattagttaaattgtaatggtggttggaacgttttttttgggtggttatagttattacgattttttatggttagggttagtatgttttttttgtaaaggatagaaaaagtttttgtagtgattttgttattagattataagaatagttataaataatgtgtaaataggaggggttgtatattaatataattttatgaataaaattaggtagtggggttgaatgcggtggtttacgtttgtaattttagtatttcgggaggtcgaggtgggtggattatttgaggttaggagtttgagattagtttggttaatatagtgaaatttcgtatttattaaaaaaatataaagatgag

SEQ ID NO: 115 - DNA, 5152 bp, Artificial Sequence
  chemically treated genomic DNA (Homo sapiens)
ataaataaatttaattaaaaaaaaggtataattaaaaattaagtaaagtttatttgaaagtttcgaaattatattttattatttaaaatggtgaaagtaaatacgtggtttataaatggttggtttttgggatgatatcgtggtgtattaaagatttagttaaaaaagtgtatgttagttttttattttaagatatattatgtatattttggatagttaattttaaagatatttatttgaattaagagtttttttaataaagtataatgtggtaatttattaaaagtttataaaaataaggtaagtatattatttaatagtagattgttttgtttaaaattgtttgtttatttgtttttataatttggttataattttattataaatgtatttgaaagaattgataatttataaaattaaggtgggggtgaaattaaattgaataatataattatatttattaaaaataattatgttagataagaaaattagattttatatattgaatgagaaatttatagggttaaaagataaaaggggtcgagaattttttaaatagtttttagttatttttagtttagcgagggtatgaattagaaaaattataataaaaataaaaatagttgtaatttttgtataattattttaaaagattatttttaatttttttatttaaaaaaatttattgagttaatttattattttgaataaggaatttagtagatggttcgtgaggtgaatttgaaagtttgaaagatatggagtaagtttttttaattaattagtaaatgtagttaatgtttattatttatttattataaataatatgtttataatatttatatatttaattttttttaaaggtattaagtttcgtgaaattaaaagtttgttttatttttaatttttaatatgaaatattaggagtttataatataaaaggtataaagaataaatttatttaaatgagtttaattaaaattttaatatatttttttattatatatagagattttgtttttttttagttttaaaatagatgtatttattatagttttttattttataaatttaaaggaagtaaagtataggaaaatgaagtagataatataaatgagaattaaagtaattatatgtgattaatattatttagattattttaaaaatatttaattaggttaataggttataaaggtttaaatatgtatttatttatagaaggaatttttaaagttttttttaggtattttatttaaggtaaattagatgttttgtttatattttgggtgaaattatttattatatttttgggtttagtatttaaaatggttttatttttgattattggaaatttttttttttttttttttttttttttttgcgatgtagtttcgtttttgttgtttaggttggagtgtaatggtacgatttcggttcgtcgtaatttttattttttaggtttaaatgatttttttgttttagttttcggagtagtcgggatattataggtttgtgttattatatttcgttaattttgtatttttagtagagatggggtttttttatgttggtttggttggttttgaatttttaattttaggtgatttgtttgttttagttttttaaagtggtgggattataggtgtgagttattttatttggttaggaattttttttgtttatagttttattgataaattataaagattaaaaatagatgttttacggataaagtatattataattaatttttttatgttaattttttataattaatttttttagttaattttatgaaaatgtagtatttatagaattaaaaatattttttttaatgattattttgatttttaattttttagttttttgattttaagattataaaatttaagttgttttttatttatattattatttttggtgatttggttttataaaattattaagggattgggtgaaaagtttaagtatattaaatttattttaaattaaattttaatgttttgaaggtttataaaagttatatttgagaagatataaaaatattataggagtgaaggtttgtattattgtagtatttataaattttaattaatatagtatttttaaattttatattatttaagattttaaatttaataatttatggttggatgaggtggtttatgtttataattttagtattttgggaggtcgaggtaggtgaattgtttgagtaatttggtaaagttttatttttattaaaaatataaaaaattagttgggtatattggcgtgtgtttgtcgttttagttattcgggaggttgaggtaggagaattgtttaaatttaggaagtagaggttgtagtgagttgagattatattattttattttagtttgggtaatagagagagatttttgtttttaaaattagttaaataaataaataaattttaataatttaaaaaaaaaaaataaaatttttgttttttattggttttagaataaatataaaaataggaagtttgtgttatttttgggtttttgtagttgttattttttttagttagatggttttttattatattttttttttattacgtttttgtttaaatattaaatattatttttttgaataggttttttcggtgtagttttagttgtttaaaatttataatttgttttattttttttgtttttatttgaaattataaattttgtttatggtttgtttttattagaatgtaagttttataatgatagggatattgttttgttgaatagtttttatagtatatagaataatgtggtattatagtagaggtttaaaaatttgtgttttaaagaaggttaatagtgaaaaaatgattttaatttttttaagttttgaaaattttgttttaaaatgtaaatttatgttttgtgtttttagaggttaaaaaaaatatttaagtgtagtattttaaataatattttgaaaatgtaatttatttagtttgtaatattttaatagttagttttatataaattatttttaatattggtaaaatattttttattatgtgggttttatatatatatatgtttaatggatttattttattttatatatgttgattgataattttttgagtatttattatggatttagtataatattagatattatagggttaaaaaatgggatataattttttttttgaggaaattttaatatgtttgtttagataaaataaatagaaatgaatgaagtattaaattgtgagagataaaaatttggaagattagttattgaagagttaataaaatgtgtttgaatagtttttataaaataatttttaaagttattgaatgatttagttttgaaataagttattgttaatattttaaaaatattttgttgtaattattttttaaaattatttcgttaattataaatagtttatttttacgatttattttagtatttagaaaaagaaaaaaaagaaaaagtaagtaaattaaaggtgattttaaagttattttaattaaattatatatgttatttagaaaataaagtgtttttatattttttagtttaaaggagattttattattaatttttaaaataagagttggaaataatcgtttaaaaattttgattttttgtaaatgtaaagaaaataagtaaaatatagtttgtaagaattagaaattatagtgtaagtagtgttttttaatatttaggtattttaggaattttttttaaaaatgggaaaatttttataaattaaagattgtgttaaaggaaattagttttaatgaaaatattttttattttttaattttaggtgttaaagaaaattgattttatgttcgtgtaataaatttgtatatatattttttgaatttaaaataagttaaaattttaaaaataaaaaataaaaaataaaaaaattttaaagtattttttaatataagtataataatagttatatgatggcgttgttattttattgttttaaatttttttttttttttttttttttttttgagatagggttttgttttttgtttaggttgaaatgtagtggcgtaattacggtttatgatagttttgaatttttgggtttaagttatttttttgtttgagatttttgagtagttgggattgtaggtaagtgatttttttatttggttaatttattttattttttttatttttttttttttttattttgtagagatagggttttattatgttgtttaggatggtttggaatttttggatttaagtgttttatttatttcggttttttaaagtgttgggattataggtatgagttattatgttcggttatattgtttttgtttgtaaaataatttattgtttaaaaataaataaataatttggtatttagaaataggttttgattttaatttaaaaagtgttttgaattttattttaggtttattttttaataaaaatagttaaaaaaaaaaaaaaaaaggtttaaaaagtaatatgtggtagtttttagtatttaggataaattattttatttattttaggatttttagaagtattatagtgaaggtatttttggatttttaagaaatgttttaataatattaggatatttgttttaaaaagtaaagaatttatttaatgaaatttaaagaattttttacgaaatgttaattggaaaaattgtggtatttgaaaggataaaaggtattgtgtttttttcgtgagaatattgaataaatgaagaatatataaaataagtgaaaatataaaaataggtaagtttatagatagaaatttttaaagtatatgatataaaggtatttgttttagaatgaggtattaatatttttaagttttgtattaaatgttttgttttaaaatttatttttttggaagaaaagatgagaattcgttttttatttttttattttttttaaagaaaaagaaaatgttaaaagattttaaaattttatattgaattgattttgttttgtgatagggttttatattgttgtttaggttgaagtgtttacggtttattgtagttttaagtttttgggtttaagtaagtgatttttttattttagtatttatagtagttggagattataggtatgtgttattatgtttagttagttttttttttttttttttttgtaga

SEQ ID NO: 116 - DNA, 5152 bp, Artificial Sequence
  chemically treated genomic DNA (Homo sapiens)
tttataaaaaaaaaaaaaaaaaaaattagttggatatggtggtatatgtttgtagtttttagttattgtagatgttggggtgggaggattatttatttgagtttaggaatttgaaattgtagtgagtcgtgagtattttagtttgggtaatagtgtgagattttgttataaaataagattagtttagtataagattttaaaattttttaatattttttttttttttagggaaagtggaaaaataaggaacggatttttatttttttttttagaggaataaattttagaataagatatttaatgtaggatttgagaatgttgatgttttattttaaagtaggtgtttttatattatatattttagaaatttttatttataaatttatttatttttatgtttttatttattttatatattttttatttgtttagtgtttttacgaaaaaaatataatgttttttatttttttaagtgttataatttttttagttaatatttcgtaagaaattttttagattttattaggtagattttttattttttaaaataggtgttttaatattattgaaatattttttgaaggtttaggaatgtttttattgtaatgtttttgaaggttttgagataggtgggatggtttgttttaagtgttaaggattgttatatgttgttttttgggtttttttttttttttttttaattgtttttattgaaaaatggatttgggatagaatttaaagtattttttaagttggagttagagtttatttttaaatgttaggttatttatttatttttaagtagtgggttattttataggtaagaatagtatggtcgggtatggtagtttatgtttgtaattttagtattttgggaggtcgaggtgggtggaatatttgagtttaggagttttagattattttgggtaatatggtgaaattttgtttttataaaataaaaaaaaaaaaaaatgaaaaaagtaaagtaaattagttaagtgagggggttatttgtttgtagttttagttatttaggagttttaagtaggaggatggtttgagtttaggagtttaaggttgttatgagtcgtgattgcgttattatattttagtttgggtaaggagtaagattttgttttaaaaaaaaaaaaaaaaaaaaaaaaaagtttggaatagtggagtggtagcgttattatatggttgttgttgtgtttatgttgagaggtgttttggggtttttttgttttttgttttttatttttaaaattttaatttattttagatttaaggagtatatgtgtaggtttgttatacgggtataaagttagttttttttgatatttaagattaaaaagtgaaagatatttttattgaaattggttttttttaatatagtttttggtttgtgagaatttttttatttttgaaaaggatttttagaatatttaaatattgagaaatattgtttatattataatttttaatttttatagattatattttatttattttttttatatttataaagagttaagatttttgagcgattgtttttagtttttgttttgaaaattagtaataaaattttttttaaattgaagagtgtaaaaatattttattttttggatagtatatgtggtttgattgaaataattttgaaattatttttaatttatttgtttttttttttttttttttttttagatattaaaatggatcgtaaggataagttatttgtgattaacgaggtaattttggaaagtaattgtaataaaatatttttaaaatgttaatagtggtttattttaaaattaagttatttagtgattttaaaaattattttgtaaaaattatttagatatattttattaattttttaataattggttttttaaatttttattttttatagtttagtgttttatttatttttgtttgttttgtttgaataagtatattgaaatttttttaggagaaggattatgttttattttttaattttgtagtgtttagtattatgttaaatttatagtaggtatttaaaaaattattagttaatatatataaagtaaaataagtttattaaatatatatatatataaaatttatatggtaaaaagtgttttgttagtattaaaagtgatttgtgtggaattggttattaaggtattataaattgaataggttatatttttaaagtattgtttaagatattatatttaggtattttttttaatttttggaagtatagaatataaatttatattttaaagtaaaatttttaaaatttagaagaattaggattatttttttattattagttttttttagagtataaatttttgaatttttgttgtaatattatattattttatgtgttgtagaaattgtttaatagagtaatgtttttgttattatggaatttatattttaatggagataggttataaataaggtttataattttaagtaaagataggagaaataaagtaggttataggttttggatagttgaggttatatcggaaaaatttgtttaaagggatggtgtttaatatttgagtagagacgtagtgaaggagaaatatggtaaaagattatttagttagagaaaatggtaattataaaagtttagaagtggtataaattttttatttttgtgtttattttaagattagtaagaaataaaagttttgttttttttttttaagttgttagggtttgtttatttgtttaattggttttggagataaaagtttttttttgttatttaggttggagtgaagtggtatgattttagtttattgtagtttttgttttttgggtttaagtaatttttttgttttagtttttcgagtagttgggacgataggtatacgttagtatgtttagttaattttttgtatttttagtagagatggagttttgttaggttgtttagataatttatttatttcggttttttaaagtgttggggttataggtatgagttattttatttagttataagttgttaggtttaaagttttaaataatgtggagtttaagagtattatattaattagagtttatgaatattatagtaatataagtttttatttttgtaatgtttttgtgtttttttaagtgtgatttttgtaagtttttaagatattgaagtttaatttgaaataggtttgatatatttaggttttttatttaattttttagtgattttatagaattaaattattagaaatgatagtataaatgaagaataatttaagttttgtgattttagaattaaaaagttaaaaagttaaaaattaaaataattattaaaaaggatgtttttagttttataagtattgtatttttataagattggttaagaagattgattatgaaggattaatataagaagattagttgtggtatgttttattcgtagggtatttatttttagtttttgtagtttgttaatgggattatgggtagaagaggtttttggttaggtgaggtggtttatatttgtaattttattattttgggaggttgaggtaggtagattatttgaggttgggagtttaagattagttagattaatatggagaaattttatttttattaaaaatataaaattagcggggtgtgatggtataggtttgtaatatttcggttatttcggaggttgaagtaggagaattatttgaatttgggaggtggaggttgcggcgagtcgagatcgtgttattgtattttagtttgggtaataagagcgaaattgtatcgtaaaaaaaaaaaaaaaaaaaaggagggaggtttttagtaattagaagtgagattattttagatgttaggtttaaaaatatgatagataattttatttaagatatgggtagagtatttagtttattttgggtagaatatttaagaggaattttaaaggttttttttgtgaataaatatatgtttaggtttttgtagtttattagtttggttaggtatttttgagataatttggatgatattaattatatataattattttagtttttatttatattatttattttatttttttatattttgttttttttaggtttgtgaaatgaagaattgtaataaatgtatttattttgaagttaagaaaaaataggatttttatatgtggtaagagaatgtattaagattttggttaaatttatttaagtggatttgttttttgtattttttatgttatagatttttagtgttttatgttaagggttgagaatgaagtaaatttttgattttacgaaatttgatatttttaaagaaaattaaatgtataaatattataagtatattatttatggtgaataggtggtaagtattgattatatttgttaattagttgaaaaagtttattttatattttttaggtttttaaatttattttacggattatttgttaaattttttgtttaaaatagtaagttgatttaataaatttttttagatgaggaaattaaaagtaattttttgaaatagttgtgtaaaagttataattatttttgtttttgttgtaatttttttagtttatattttcgttgaattgaagatgattggaaattgtttgaaaggttttcggttttttttgttttttgattttgtaagttttttatttagtgtatgaggtttaatttttttatttggtatggttgtttttagtagatatagttgtgttatttaatttagttttatttttattttggttttatggattattaatttttttaggtatatttataatgaggttatagttaagttatagaaataaatgagtaaatagttttaaataaggtagtttattgttaaataatatgtttattttatttttataggtttttgatgaattattatattatgttttgttaaaagaatttttaatttaggtaaatatttttaaaattagttatttaaaatatatatgatatattttggaataaggaattaatatatatttttttaattagatttttagtatattacggtattattttaaaagttaattatttgtggattacgtgtttatttttattattttggataataggatatggtttcggaatttttaggtaagttttatttgatttttaattatattttttttttaattgagtttatttat

SEQ ID NO: 117 - DNA, 6656 bp, Artificial Sequence
  chemically treated genomic DNA (Homo sapiens)
tggtaattttatttttttagttatttaggttaaaaattttattttttatttttttgtttggtttatatttcgtaaataattattaataaattttataggtttatttttaaaatatatataaaatttaattttttttttttattttattttggttagagatatttttatttggaataatatagtataagtttttgattattgttcgtatttttatttatttattatttatttgagatagtttttttttattttgtcgtttaggttggagtgtaacgacggaatgatagtttattgtaatttcgaatttttaggtttaagtgatttttttgttttagttttttgagtagttgagattataggtatatattgttatgttaatttttttttttttttttgagatagagttttgttttgttatttaggttggagtgtaatagtacgatttttatttattgtaattttcgttttttgggtttaagagatttttttgttttagttttgcgagtagttaggattttaggtacgcgttattatttttagttaattgtttgtatttttagtagagacggggttttattatgttggttaggttggtttcgaatttttgattttatgattcgttcgttttggttttttaaagtgttgggattataggcgtgagttatcgtattcggtttaatttttttatttttgtagagatatggtttcgttatgttgtttagttatttttttatttcggttttttaaagtgttgggagaattgtttattattatgatattagtatttagaatatgtggtatataatatgtatttaatatatatttattaagtaaaaatagtatatatagttaaattttaaatgatgttagtgaattagttaattatgtgtttaaattgttttaaatatatgaattaatttatttgattagtttaagaggttaggtattattgttattatttttattttgtagatgaagaaattaaggtataggttaaggttaggaaataaataatattaagtagtttgttttatattatattatggtaaagttaggatttgaatttaggtattttgattttagaatttaaattttagtatattgaaagatttggtgagtaatagattttaattatattttatatataaaaaataaataagaaaaaaaaataaattatattttatataatttgtatgttaagtttattttattatatgtttttgaaaattgataattaatgtattattgatttttaaattaaaatattttattttttgatttttttttattaatgtttttgatgaaatatgtgtaaaatatatatttaataatttttatatttttaaatgtaaatatagtgtaaaatcgagtagttgttgttatgaaaatttttattttttttttttttttttttttttttttttgagacggagttttgtcgtgatttaggttggagtgtagtggtgtaatttcggtttattgtaagttttattttttaggtttaagtaatttttttgttttagttttttgagtagttggggttataggtgtgtattattatatttagttaatttttatttttattttttgagatggaatttcgttttgtagtttagattggagtgtagtggtatgatttcggtttattgtagtttttgttttttaggtttaagtaatttttttgttttagttttttgagtagttgggattataggtatgtgttattacgtttagttaatttttatatttttagtagagatagggttttattatgttggttaggttagtttcgaatttttgattttatgattcgtttgtttcggttttttaaagtgttgggattataggtatgagttacggcgttcggttaagaatttttatttttaagtttgtagtattaatgttgaattaatagattggtatatttatttatgatataggtaatgaaggaaaaaaaatattttagtagatttatttgaagatttattgatttttattgaaaaaggtttgttttatggtttattatttttatggtttttaggttggttatgttgggttttaggtgggttttttagatttttttatttttagggtaagtagtaagttacgggtgggaagtgataggtatttagtatgagtaggaggtaagggatcgtgaggtttgtgtttgtgggtagttggttataatttagacgtgtttgattagtttagtgatagttggagtggataaagtgattaagggttttaaggatatataaggttaagaagatttgaagtgttgtgtaagatatgtttaatgtatttggattttatttttgtttaacgaatatgtatatataaaaaatatttgaattttttgagttaggagtttaagattaatttgggtaatatagtgagatatttatttttaaaaaaattttaaaaaaaattaatttggtatgatagtatttatttgtagttttgtttattttggaggtcgtagtgggaggattatttgagttttggaggttaaggttatagtatgttatgattgtattattgtattttagtttaggcgataagagcgaaacgtttataaaaaaaaaaaaaaaaaaagatttataggtgatggtgatgttgttggttaaggaagtgaagtggttttttgttttgtagtttttttgaatgttaggggttttttgttttttatttgttttatttttattaagttttttttttttagttattttgttagtttttggaaagtattttagtgattgtggtttttatttttttttgattttatagtgtttagggttatgttgtttatatagtagtgagtagtaagttgaggtttttaaaaattttattattattatttttgagatggagttttgttttgttatttaggttggagtgtagtggtataattttagtttattgtaatttttgttttttaagtttaagtgatttttttgttttagtttttcgagtagttgggattataggcgtttgttattatattcggttaatttttttgtatttttagtatagatggggttttattatgttggttaggttgatttcgaatttttgattttaggtgattcgtttgttttggttttttaaagtgttagggttataggtgtgagttattatatttggtcggtttttttaaattttaaaatagatttatttgattttttttttttattttttagtttttttgaggtatgattgataaaaattgtatatatttagggtgtataatgtgatgatttgatatgtgaatgtattgtgaaatgattattatagttaaggtaatttatatatttattattttttagttatttttttagttagtataggttgggtattgtttttttgaaatgttttgggattagaagtgttttggattttagattttggaatatttgaatatatataattagatattttgggaaggggatttaagtttaaatatgaaatttatttgtttttagagtttaaagatgatttttttttttttttttttttgagatggagttttattttcgtttaggttggagtgtcgtggtataattttagtttattgtaatttttgttttttaggtttaagcgatttttttattttagttttttaagtagttggaattataggttcgtattattatattcggttaatttttgtatttttataaagatattttattatgttggttaggttggttttaaatttttgattttaggtgattcgttcgttttagttttttaaagtgttgggattataggtgttagtgattgcgtttggttgataattgaattttttttttggagaagttgaataaattgtgtgttgtgtgtttgtttttttttttgtttttttttttttttgagatagagttagatattttgttatttaggttggagtgcgatggggtggttatagtttattgtagttttaaatttttgagtttaagcgatttttttatattagttttttaagtagtatagtattacgtttggttaatttttaaattttttgtagtgatggggttttgttgtttaggttagttttaaatttttgggtttaagtagtttttttgttttggttttttaaggtggtaggattataggtttgagttattatgtttggttattatttgtgttttgattataatatattatgttggtatttaaaacgttttggattttggagtattttgaattttggatttttggattagtaatgttttatttatagtatattttttgtttgtttttttataaagaattttttgtaattttgattttatagttttaaatgtaatatatttttattgtaaaaattatttttaatagtatcgttagaatagtaaatatgttaatagaaaggtagaagtagattttaaagaatttttagtagtttgagagattatagttaattattgaggaattttgttttggattggagtagtgtttagaagtttataaataatttttagggtattgtatagggatttttttttttttttttttttgaaatggagtttcgttttgtcgtttaggttggagtgtagggtgtgattttagattattgtaattttcgttttttgggtttaagtaattttttgttttagtttttcgagtagttgggattataggcgtttgttattatgtttagttaatttttttggatttttagtagagagggggttttattatgttagttaggatggtttttattttttgattttgtgatttatttatttcggttttttaaagtgttgggattataggtatgagttattgtgtttggtcgtataaggattttttatgtgattttttagtagaggtttttgttttttattttaaatattttttgagggttgtttttttttttcgttttttatttatatagaggttaattagaattaagatgtttgggattgaggaagtaatttttggaggacgtgatagttattttgttgttggcggcggtttagtgttatgttttggataggtaattgtggtttttttatgtcgggaaagaatgaggtgaagtgagtaaagttagggtaaggtagtttgtagagtatcgtagtatatgtgtgagtagtatttagtacgtttatttagtacgtgtgtgagtagtatttagtacgtttatttagtacgtgtgtgagtagtatttagtacgttgacgcggtgcgtgcgggggtagtatttagtacgtttatatagtatatgtgtgagttatttgttattggttttttttttagatgtattttttgggagttttgtgaattttggagggtattttggaatgttagttattaaaagattgatagtattggggattagatttagattttaaattttttgtggggggggatagataatatatttgtatgatattaaatttaaaatgaaattgtgaaaatttttttattttttattgtttttgtgtgtatgttatttagttttattttttttttttttcgagattgagttttgttttgttatttaggttgtagtgtagtggtgcgattttagtttattgtaatttttattttttggatttaagtaatttttttgttttagttttttaagtagttgggataataggtatgtattattatggttagttaatttttatatttttagtagagatggggtttaattatgttggttaggttggtttcgaatttttgattttaggtgattcgtttgtttcggttttttaaagtgtttggattataggcgtgagttattacgttcgggtttaatttttttgtatttttagtagagatgtggttttattatgttggttagggtagttttgaatttttgatttcgtgatttgtttgtttcggttttttaaatgttggaattataggtatgagttatcgcgtttggttttagttgttttttttggaggtatggaaagttattgggggttttattttttgtagggatattgtgtgtatagaaaagagttttttgttttgtttatttaaattttatttttgtttttagtagagagttgtgagtatttattttatttgagtagggtaagggggataaaatttaaattagtaagtagtagtgtgtttttgtttgtgtaggatgggaaattgttgtattggagaaggcgttaatttttggaaaggataaatggaagtaaggttttttattttcgtgtttttttcgtatttgttttttgtgttgacgttatttatagatttggaggtagaatattttagttttttaagttttagaaatatttataaggatggtagtagtagttaaggtagtagtttttaaaatgtagtttttaaaaattttggggtttttgaagattttttagagtttagaaggttaaaattatttttataataatattatttgttttttttatatttattgttttatgagtgaatggtagagtttttagagagtgtatgatatgtggtgatgttattgttatgatgtttaatggtatgtatgttttaaaagttttttagttttgatttttaataggatatatagaatttatataaataaaggttttggggggtttttttaagagtataaagtttttataaaggatggagatttaatgatgtgaggaatggtggaagtgtgaatttaatttttttttttggggttgtagt

SEQ ID NO: 118 - DNA, 6656 bp, Artificial Sequence
  chemically treated genomic DNA (Homo sapiens)
attgtaattttaaaaaagaaaattaaatttatatttttattattttttatattattgagtttttattttttatggagattttatatttttaaaaagattttttagaatttttgtttatgtgggttttatgtattttattaggaattaaaattgagaaatttttaaggtatgtatgttattaggtattatagtagtgatattattatatattatgtattttttgaaaattttattatttatttatgagataatgagtgtgaaagaggtaaatagtattattatgaagataattttgattttttggattttgaaagatttttagaaattttagggtttttgagaattgtattttgagaattgttgttttagttgttgttattatttttataaatgtttttgaagtttaggaagttaaaatgttttgtttttagatttgtaaatgacgttagtataggaagtaagtacggaaagagtacgggggtaggaagttttgtttttatttgttttttttagagattgacgttttttttaatataataattttttattttgtataaatagaaatatattattgtttgttgatttgggttttgttttttttgttttgtttagatgagatgaatatttataattttttgttaaagataaagatggagtttgggtggataaagtaagaaatttttttttgtgtatataatgtttttataaggaataggatttttagtaattttttatgtttttaagaaagataattggagttaggcgcggtggtttatgtttgtaattttagtatttaggaggtcgaggtaggtagattacgaggttaggagtttaagattattttggttaatatggtgaaattatatttttattaaaaatataaaaaaattaagttcgggcgtggtggtttacgtttgtaatttaaatattttgggaggtcgaggtaggcggattatttgaggttaggagttcgagattagtttggttaatatggttaaattttatttttattaaaaatataaaaattagttggttatggtggtgtatgtttgttattttagttatttgggaggttgaggtaggagaattgtttgaatttagagggtggaagttgtagtgagttgagatcgtattattgtattgtagtttgggtgataaagtaagatttagtttcgaaaaaaaaaagaaatagaattgggtggtatgtatataggggtaataggaaatagggagatttttatagttttattttgaatttgatgttatataaatatgttatttatttttttttataaaaaatttaaaatttaaatttaatttttagtattattagttttttgatagttaatattttaaaatgttttttagagtttataagatttttaaaaaatgtatttaaaggaaaaattaataataaatagtttatatatgtattatgtaaacgtattaggtattgttttcgtacgtatcgcgttaacgtattaggtattgtttatatacgtattaggtaaacgtattaggtattgtttatatacgtattaggtaaacgtattaggtattgtttatatatgtattacgatgttttataaattgttttgttttaattttatttattttattttattttttttcggtatgaaggaattatagttatttgtttaaagtataatattgagtcgtcgttagtagtaggatggttgttacgttttttaagaattgtttttttagttttagatattttgattttggttgatttttatataaataaaaagcggaaaaaaaaaataatttttaaagaatgtttaaagtaaaaggtaagagtttttattgaaaaattatataaagaatttttatgcggttaggtatagtggtttatgtttgtaattttagtattttgggaggtcgaggtgggtggattataaggttaggagatggagattattttggttaatatggtgaaattttttttttattaaaaatttaaaaaaattagttgggtatggtggtaggcgtttgtaattttagttattcgggaggttgaggtaaagaattgtttgaatttaggaggcggaggttgtagtgatttgagattatattttgtattttagtttgggcgatagagcgagattttattttaggaaaaaaaaaaaaaaagaatttttatgtaatattttaagagttatttataagtttttaagtattgttttaatttagaatagagttttttagtggttagttgtggttttttaagttgttgaagattttttaaggtttatttttatttttttgttaatatgtttgttattttggcggtgttattaaaggtgatttttataataagaatatattatatttagaattataaaattaaaattataaaaaattttttatgggaaagtaaataaaaaatgtattataggtggaatattgttaatttaaaaatttaaaatttaaaatgttttaaaatttaaaacgttttgagtgttaatatgatgtgttatagttaaaatataggtaatggttaggtatggtggtttaaatttataattttattattttgggaggttaaggtagaaggattgtttgagtttaggagtttgagattagtttagataataaaattttattattataaaaaatttaaaaattagttaggcgtggtgttatgttatttaggaggttgatgtgggaggatcgtttgagtttaggagtttgaggttgtagtgagttatgattattttatcgtattttagtttgggtgatagagtgtttgattttgttttaaaaaaaaaaaaaaataaaaaaaaaggtaggtatataatatatagtttatttagtttttttaagagaaaaatttaattattagttagacgtagttattgatatttataattttagtattttgggaggttgaggcgggcggattatttgaggttaggagtttgagattagtttggttaatatggtgaaatgtttttataaaaatataaaaattagtcgggtgtggtagtgcgagtttgtaattttagttatttgggaggttgaggtaggagaatcgtttgaatttgggaggtagaggttgtagtgagttgagattgtgttacggtattttagtttgggcgagagtgagattttattttaaaaaaaaaaaaaaaaaaaaattatttttaggttttgaaaataaatgaattttatgtttagatttgggttttttttttaagatatttgattatatatatttaaatattttaaaatttgaagtttaaaatatttttggttttaaagtattttagagaagtaatatttaatttgtattagttaagagggtaattgggaggtggtggatatgtgaattattttgattgtggtaattattttatagtgtatttatatattaaattattatattgtatattttaaatatatataatttttgttagttatattttaaaaaagttggggggtagggaagaaaaattaagtgaatttgttttaaagtttaaaaaaatcggttaggtgtggtggtttatatttgtaattttaatattttgggaggttaaagtaggcggattatttgaggttaggagttcgagattagtttgattaatatagtgaaattttatttgtattaaaaatataaaaaaattagtcggatgtggtggtaggcgtttgtagttttagttattcgggaggttgaggtaggagaattatttgaatttgggaggtagaggttgtagtgaattgagattgtgttattgtattttagtttgggtgatagaataagattttattttaaaaataataataataaagtttttaaaaattttaatttattgtttattattatataggtagtatgattttggatattgtggggttaaaaagaaatagaagttataattattgaaatgttttttaggagttaataagatagttggagggaggagatttaatagaaatgaaataaatgaagagtaggaggtttttaatatttaggaaggttatagagtaaaaagttattttatttttttaattagtagtattattattatttgtgaatttttttttttttttttttttgtaagcgtttcgtttttgtcgtttaggttggaatgtagtggtgtaattatagtatattgtaattttgatttttagggtttaggtgatttttttattgcggtttttagagtagataggattataggtgagtgttattatgttaggttaattttttttaaaatttttttagagatgagtgttttattatgttgtttaggttggttttgaatttttggtttaaggagtttaagtgttttttatgtgtgtatattcgttaaataaaggtagaatttaaatgtattaggtatattttatatagtattttaaatttttttggttttgtgtgtttttgaggtttttggttattttgtttattttagttgttattgggttgattaaatacgtttgggttataattaattgtttataggtataaattttacggttttttattttttgtttatattgggtatttattattttttattcgtggtttgttgtttgttttagaggtggaagggtttgggggatttatttggaatttaatatggttaatttagaagttataggaataatgggttatgaggtaaattttttttaatgagaattaatagatttttagatgagtttattgaggtgtttttttttttttattatttgtgttatagataagtatgttagtttgttaatttaatattaatattgtaaatttaaaagtgaaggtttttggtcgggcgtcgtggtttatgtttgtaattttagtattttgggaggtcgaggtaggcggattatgaggttaggagttcgagattagtttggttaatatggtgaaattttgtttttattaaaaatataagaattagttgggcgtggtggtatatgtttgtaattttagttatttaggaggttgaggtagaagaattgtttgagtttgggaggtagaggttgtagtgagtcgagattatgttattgtattttagtttgggttatagagcgagattttattttaaaaaataaaaataaaaattggttgggtgtggtggtgtatatttgtaattttagttatttaggaagttgaggtaggagaattgtttgaatttgggaggtggagtttgtagtgagtcgagattgtattattgtattttagtttgagttacggtaaaatttcgttttaaaaaaaaaaaaaaaaaaaaaaaaaaaaagtgaaggtttttatagtaatagttgttcggttttatattatgtttatatttagaagtatgagagttgttaaatgtgtattttatatatattttattagaaatattaatggaaaaagattaagaaatgaagtattttggtttaagaattagtagtatattgattattagtttttagagatatatagtaaaataaatttagtatatagattatgtggaatataatttgttttttttttttatttattttttgtgtgtggaatgtaattgaaatttgttgtttattaagttttttagtgtattagagtttgggttttggggttagagtgtttgagtttaaattttggttttgttatggtatgatgtagggtaaattgtttaatgttgtttattttttaattttaatttgtattttaatttttttatttgtaaaatagaaataataatagtagtatttaattttttaagttggttaaatgaattaatttatgtatttagaatagtttgggtatataattagttggtttattaatattatttgaagtttaattgtgtatattatttttatttaataagtatatattaaatatatattatgtattatatattttagatgttggtattatagtagtgaatagtttttttagtattttgggaggtcgaggtgggaggatggttgggtaatatagcgagattatgtttttataaaaataaaaaaattaggtcgggtgcggtggtttacgtttgtaattttagtattttgggaggttaaggcgggcggattatgaggttaggggttcgagattagtttggttagtatggtgaaatttcgtttttattgaaaatataaataattagttgggggtggtggcgcgtgtttggaattttggttattcgtaaggttaaggtaggaaaattttttgaatttaggaggcggaggttgtagtgagtggagatcgtgttattgtattttagtttgggtgatagagtaagattttgttttaaaaaaaaaaaaaaaaattagtatggtagtatgtgtttatagttttagttatttaggagattgaggtaggaggattatttgaatttaggggttcgaggttgtagtgagttgttatttcgtcgttgtattttagtttgggcgatagagtgagggaaggttattttaaataaataataaataaataaaagtacgggtagtagttaggagtttatgttgtattgttttaggtgagggtatttttgattaaggtgaaatggggaggaggggttggattttgtatgtattttgagggtagatttatagaatttgttggtggttgtttgcgggatgtgggttaaatagaagaataaagaataaggtttttggtttgaataattggaagaataaagttgtta

SEQ ID NO: 119 - DNA, 5915 bp, Artificial Sequence
  chemically treated genomic DNA (Homo sapiens)
taatgaggatagtttattttatgaagagtaggaggaggtatttttattatttttattttagattgttaaaaattataggtcgggcgtcgtgttacgtttataattttagtattttgggaggtcgaggcgggtggattacgaggttaggggttcgagaatagtttgattaatatggtgaaatttttatttttattaaaaatataaaaattagttgggcgtggtggtggatatttgtaattttagttatttagtaggttgaggtaggagaattgtttgaatttgggaggtggaggttgtagtgagttaagattatattattgtattttagtttgggcgaaagagcgagatttcgttttaaaaaaaaaaaaaaaaaattatgggaggttggttgggagcgggggtttatttttgtaattttagtgttttgggaggttaaggtaggtagattatttgaggttaggagtttaagattagtttggttaatatggcgaaattcgtttttataaaaattagttgggtgtggtggtgtacgttagtaattttagttgttgtagaggttgaagtaggagaattgtttgagttcgggagatcgaggttgtagtgagtcgagatcgtatttttgtattttagtttgggtaatagagtgagatttcgtttaaaaaaaaaaattatggaggttattgtttttaattgagtttttatattaggttttaaaagattagattaaattaagatggagtaattcgtgttaaatgttatgtaatttaattgaaattttaaagaagtagatagattttaaaatagattatttttttttgaaaataggagagtttaatttatttaagttagtttaataaggaagttttttttgttttaattttataaaaaagtaatttgaagtatttgatgttaattaattaggtttttttttattgttgttttttggtttttattttataaaatttattattttgttattgtttaatggaagtttttattttattttgtagaatgggggttgttttaatttatgaattataaataaaagttaatttgatttataattgaatttgtaagggagattgagtgatttgtttaaagttatatatttagtaaatattttagttagggatttgttttaagtatttaattatatatttaagtataggttgggggagggagggggtaatgtttaggtagttattttgggtttttgtagagtgggggtagggtgggtggataatgaggatggtattttttttttttttttattatagttttttggaattatttttaatttttttttgttttttaggattggtaggtatttgtagtttttttttttttttttttttttttttttttttgagacggagtttcgttttgtcgtttaggtcggattgcggattgtagtggcgtaatttcggtttattgtaagttttgtttttcgggtttacgttatttttttgttttagtttttcgagtagttgggattataggcgtttgttatcgcgttcggttaatttttgtatttttagtagagacggggttttattttgttagttagggtggtttcgattttttgatttcgtgatttattcgtttcggttttttaaagtgttgggattataggcgtgagttatcgtgttcggttttgtagttttttttttgtgtgtaatgttttttaggtttatttattttagatttttattattattttttttttaatagtttttataagttttgtaggattttttgtaataggttttgggaagagggagggattggtagagaaatagtttgtatttagaagagaaggggggtgggttagagtaagattattttgtgttatagagttggaaaaggattgttttcgatatttgtatattttattttgttttttgtgtttttgataaaggataatggtatggggaaattaagagatttaggaagaattttaatttaggtgtgtgtggttttaaagtttttttgtgttttttgttgttgttgttgtttgtttttttgagacggggttttgttttgtcgtttaggttggagtgtaatggtacgatttcggtttattgtaattttcgttttttggatttaagttatttttttattttagtttttcgagtagttgggattataggtattcgttattaggtatggttaatttttttttttgtatttttgtagagatggggttttattaagttgtttaggttggttttaaatttttgaatttaggtgatttatttattttagttttttaaagtgttgggattataggcgtgagttattatattcggtttttaaagtttttttgattttatagtattttttttgggtttttggaataaagatatataggatttagttaaattgtaggatagatttaaagttgggtttttaaaaaatagggttggagttgtttgttaaatttttgttgttttattgtttagtgggttattgtaggttgggatgagttatagggtagaggtcgggagttgtagaaattgagttgttatttttggggaagtatgtttattatttttattattttggaggtagtgcgttttaggaggtagaagttagtatggttggtttttgttagggttttcgggtgttttgtagagagtggtatgtaggttttggattttagggtttggttagttttttggttgagtagaggttattggttaagtttttttattattgttttgagtttttggtggttttgtgttttttaatatatgtggtgagtagagtagagttgggaatacgtagagattgttggaggttagggagttaaaggttaagagagtagaataatgtcgaagtattatgtttatggttttcgagtgtttttagtttatgggtaatttttatttttggttttttgttatattatacggttttttattggtttttttttgatatattgtggttatgtaataatggttgatttttggttttttttagaagaagaaaaaaaaaattatatttataattgttatattagtttaaggaaaatttttgttatttaatattgttagtttattgtttattttatattttttttatgtaatttttatattattttgagattatagttaattattttttttaggagaggaaacggaagtatcgagaggttttttttatcgaaatgatacgaatggtaaattgttgagttgggattgaaatttaggtagaggaaggaagtaatgaatggaaagaggtggtttagttggaattagtaggtatttaaattgtgtagtttttttttttttggttttttgtaagggtaataattttgtttaatttatttaaatatttatatgtaagagtaattttaaaattttagttttcgtcgggtatagtgatttatatttgtaattttagtattttgagaggttgaggcgggtagattatttgaggttagaagtttgaaattaatttggttaatatggtaaaattttgtttttattaaaaaaatataaaaattagttaggcgtggtggtaggcgtttgtaattttagttatacgggaggttgaggtaggagaatcgtttgaattcgcgaggtgaaggttgtagtgagtttagatcgcgttattgtattttagtttgggcgatagagtgagattttattttaaaaaaaaaaaaagtaataaaaaaataagtaaataaaaaagttttagttttggtatttttttgttaaattggaatagttgttttggattgtagggtttacggaggtgagtaaaagtagttagtcggagggtatttggttagttggttgcggaaaaggttttagtttcggacggttgagtttatttttagtttaagaggttattattataagttatttttttcgatttattagttgtagtttagcgttgttttattggggatttgaatgttgttttttattttgtaaagtttttttatatttttttattatatggaatttttaaattataattgtggtatttttattttaattatttttattatttatttatttatgtatttattttttgaggtggtttcgttttgttatttaggttggagtgtagtggagtaattacggtttaaggcgtttcgattttcgattttcggggtttaagcgattttttttttttagttttcggagttggagttataggtgtgcgatgtttcgtttggttatttttttttttttttgggtagagacggggtttcgttatgttgtttaggttggtttttaatttttaggttttagcgattttttcgtttcggttttttaatgtgttgcgaatatagattttagttatcgtatatagtttatttttatttttttgaaaaatgaattcgagggtaaagggggcggggttgaggtagatgttagaatttgttcgttttaattaagtagttaggttgtttgtttagaaagtcggtatttagtttttttaggaaaacgaagttaaggtttttatttttttcgttaataacgttagaatagaggatagtttttagattttagggattttaaatagattggtagtttttggagaataaatattttttgttttttttttgtatatttttgttttaggttattttttttcgtttttaaagtttattttttttaagtttttcgtacgagaaaataagtgagttttttttattggttagattttttgttaattttttcgttatgacgtcgagtggtgttttttgaagtttttttagtttcgtttttttaatttgattggtttatttaaataaatttcggttaatttagtcgtttataggtggatataaaaggtaagttacgattggtttttttggacggagacggtgagagcgagttagggattggttggtttgtttcgggcgggttaaaggaaggtttaagtggagtttttttaatcgacgcgcgtttgtggagaagcggtttggtcgggggtggtttcgtggggttttgtttgtttagtcgtttttagggtttttgagtttttttacgatcgttattatggaagtgttattattgtaggtacggttcgcgggggggattggcggtggagttttcgcgcggttcgggtatttttttggtcgttcgtgacgggtgaagttttggggttgcggttaggtcggcgatcggtttgggagtttatattttttattttcggtttcggggtgatcgtggagaggcggaagttttttttggtgttagtagtgaagtatgattcggtttttagggtgtcgtgcgttgttgttttgtttttaggggtaggagttcgttggtttcgtagtggatttatgttatagcggttcgggtgcgacgttattgagtcgcgcgtatagatgttttttttttttgttcgttgtttgaaaacggttttgaatgttttcgattttggaaagggtagagtttagtatagtgtttttttggagtagttggttagtttataaaagcgttttttttttgagtttataacgtttaggtggttaagggattgaacggatagtcgtttaaattgttgttgtcgaattagaattatttacggtgtcgtgtgttcgggatatcgtaaataatttataataataggtattcggtaaataatgtatgtaggaattgaaagaagtgggtgtattttattgatgatatttattatgttgtttaagaaaagaggtttttagatagatttatttggtgagataatatgtgtttgtttaatttgatatttggggatttggtcgtagcgaatttaaattgttttatttgtataaaattggtaattttattattgtttattaatagattgtaatgtatgttgatattttattatggtaggtattttgtttttagtttagggtaaatttatgattaaaaatttttttttttttttttttttttttaattgttagt

SEQ ID NO: 120 - DNA, 5915 bp, Artificial Sequence
  chemically treated genomic DNA (Homo sapiens)
gttagtaattaaaaaaaaagagagaaagaagggaatttttaattataagtttattttaaattaggaataaaatgtttattatagtgagatgttaatatgtattgtaatttgttagtaggtagtggtggagttgttagttttgtataaataggataatttaaattcgttgcggttaggtttttaggtgttaggttaaatagatatatattattttattaagtgggtttgtttggaaatttttttttttgagtaatatggtagatgttattaataaaatatatttattttttttagtttttgtatatattatttatcgagtgtttattattataaattatttacggtgtttcgagtatacgatatcgtaaataattttagttcggtagtagtagtttgggcggttattcgtttaattttttggttatttgagcgttgtgaatttaggaagggggcgtttttgtaagttggttagttgttttagagaaatattgtgttaggttttgttttttttaagatcggggatatttaagatcgtttttaagtagcgggtaggaggggaaagtatttgtacgcgcgatttaataacgtcgtattcgggtcgttgtaatatggatttattacgggattaacggatttttgtttttagaaatagggtaataacgtacgatattttggaagtcgggttatattttattattagtattagaaggggttttcgtttttttacgattatttcggaatcgggaatggagaatatgggtttttaagtcggtcgtcggtttgatcgtagttttagagttttattcgttacgggcggttagagagatgttcgggtcgcgcggaggttttatcgttagtttttttcgcgagtcgtatttgtaatggtgatatttttatggtgacggtcgtgaaggggtttaagaattttgaaagcgattaaataggtaggattttacgagattattttcgattaagtcgtttttttatagacgcgcgtcggttaggagagttttatttgaatttttttttagttcgttcgaagtagattagttaatttttgattcgtttttatcgttttcgtttagaagaattaatcgtagtttgttttttatatttatttatgaacggttgagttggtcggggtttgtttgaataaattaattaggttagggaggcgggattagagaggttttaaaaggtattattcggcgttatagcggagagattgatagggaatttggttaatgagaagggtttatttgttttttcgtgcggaaagtttggaagagatgggttttggaagcgggaaggggtggtttgaggtaaaagtgtgtaggagaaaagtaaaggatgtttattttttaggaattgttaatttatttaagatttttgaaatttaaaaattgttttttgttttgacgttgttagcgaggggaatgggagttttagtttcgtttttttgaggaaattgagtgtcggttttttggataggtagtttggttgtttggttgaagcgaatagattttggtatttgttttaatttcgttttttttattttcgaatttattttttaaagaaataaaagtaggttgtgtgcggtggttggagtttgtattcgtagtatattgggaggtcgaggcgggaggatcgttggagtttaggagttggagattagtttgggtaatatagcgagatttcgtttttatttaaaaaggaaaaaaaatagttaggcgaggtatcgtatatttgtaattttagtttcggaggttgaggagggaggatcgtttgagtttcggggatcggagatcgaggcgttttgaatcgtgattgttttattgtattttagtttgagtgatagagcgaggttattttaagagataaatatataaataaataaataataaaaataattaaaataaaagtgttatagttgtggtttgggggttttatatagtggaaggatgtagaaaggttttgtaaaatggagggtagtatttaggtttttagtagagtagcgttggattgtaattggtaaatcgaaagggataatttgtggtggtagttttttgagttgagggtgggtttagtcgttcggggttgaaatttttttcgtagttagttggttagatatttttcgattggttatttttgtttattttcgtgaattttgtagtttagaatagttgttttaatttgataaggaaatgttaagattgaagtttttttgtttgtttgtttttttgttgttttttttttttttgagatggaattttattttgtcgtttaggttggagtgtaatggcgcgatttaggtttattgtaatttttatttcgcgggtttaagcgatttttttgttttagtttttcgtgtagttagaattataggcgtttgttattacgtttggttaatttttgtatttttttagtagagatagggttttgttatgttgattaggttggttttaaatttttgattttaagtgatttgttcgttttagttttttaaagtgttgggattataggtgtgagttattgtgttcggcgaagattgaagttttaaaattatttttatatataaatgtttgagtggattaaataaagttattatttttataagaagttagaaaaaaaaaaattgtataatttgagtgtttattaattttagttgagttatttttttttatttattgttttttttttttatttgggttttagttttaatttagtaatttgttattcgtgttatttcgatggaggaagtttttcggtgttttcgtttttttttttaaaaagaataattaattatgattttagagtagtgtgagggttatatgagagaagtgtaaggtaaatagtgggttgatagtattaggtagtaggaattttttttaggttggtgtgataattgtggatgtaattttttttttttttttttaaaagaaattagaggttaattattgttatataattatagtgtgttaagggagggttaatggggagtcgtatgatgtggtaggaagttaaggatggaagttgtttatgggttaggggtattcggaaattataggtatggtgtttcggtattgttttgtttttttgatttttggttttttggtttttagtagtttttgcgtgtttttagttttgttttgtttattatatgtgttagagagtataggattattaggggtttagagtagtggtagggaagtttggttagtagtttttgtttagttagaagattgattaggttttgggatttagggtttgtatgttattttttgtaggatattcgagggttttgatagaaattagttatgttggtttttattttttagaacgtattatttttaaggtagtggggatggtgggtatgtttttttaaggatggtagtttagtttttgtagttttcggtttttattttgtagtttattttagtttgtagtgatttattgggtaatgaggtaataggaatttaataagtagttttagttttattttttaggggtttagttttaaatttgttttgtagtttagttggattttgtgtgtttttgttttaaaaatttagaagaagtattgtggagttaaaaggattttggggatcgggtgtggtggtttacgtttgtaattttagtattttgggaggttgaggtgggtggattatttgagtttaggggtttgagattagtttggataatttggtgaaattttatttttataaaaatataaaaaaaaaaattagttatgtttgatggcgggtgtttgtaattttagttgttcgggaggttgaggtgggagaatagtttgaatttaggaggcggaggttgtagtgagtcgagatcgtgttattgtattttagtttgggcgatagagtaagatttcgttttaaaaaaataaataataataataataaaaaatataaaaggattttggggttatatatatttaagttagaattttttttgggttttttggtttttttatgttattattttttattaaagatatagagggtaaaatgagatatgtaagtgtcggggataatttttttttagttttgtagtataaggtggttttgttttggtttatttttttttttttttgggtataagttatttttttgttagtttttttttttttttagagtttattgtagggggttttgtaggatttgtggggattattgaagaaagaatagtggtgggggtttgggatgggtgggtttggaaggtattgtatataaagagggaattgtagggtcgggtacggtggtttacgtttgtaattttagtattttgggaggtcgaggcgggtggattacgaggttaggagatcgagattattttggttaataaggtgaaatttcgtttttattaaaaatataaaaattagtcgggcgcggtggtaggcgtttgtagttttagttattcgggaggttgaggtaggagaatggcgtgaattcgggaagtagagtttgtagtgagtcgagattgcgttattgtagttcgtagttcggtttgggcgatagagcgagatttcgttttaaaaaaaaaaaaaaaaaaaaaaaaaagagggaattgtaggtgtttgttagttttgggaggtaaaaaggggttgggggtagttttagggggttgtggtggggggaggggaaagatattatttttattatttatttattttgtttttattttgtaggggtttaaagtagttatttggatattatttttttttttttttaatttgtatttgaatatgtggttgagtatttaaggtagatttttgattagggtatttgttgggtatatgattttgggtaagttatttagttttttttataagtttagttgtagattaaattgatttttatttgtgatttatgaattggggtagtttttattttataaaatagaatgaaagtttttattgggtaatagtagaatggtgggttttgtaaggtgggaattaggaaatagtaataggaaaaaatttgattggttaatattaggtattttaggttatttttttgtggagttaaagtagaggggatttttttattaaattgatttaggtagattggatttttttgtttttaggaaaaagtggtttgttttggaatttatttgtttttttaaagttttagttggattatatggtatttagtacgaattattttattttggtttggtttagttttttggggtttagtgtaggagtttagttgaaaataatggtttttataatttttttttttagacggagttttattttattgtttaggttggagtgtaggggtgcgatttcggtttattgtaatttcggtttttcgagtttaagtaatttttttgttttagtttttgtagtagttgagattattggcgtgtattattatatttagttaatttttgtagaggcgggtttcgttatgttggttaggttggttttgaatttttgattttaagtgatttgtttgttttggttttttaaagtattgagattataggagtgagttttcgtttttagttaattttttataattttttttttttttttttgagacggagtttcgttttttcgtttaggttggagtgtagtggtgtgattttggtttattgtaatttttattttttaggtttaagtaatttttttgttttagtttgttgagtagttgggattataggtgtttattattacgtttagttaatttttgtatttttagtagagatgggggttttattatgttggttaggttattttcgaatttttgatttcgtgatttattcgtttcggttttttaaagtgttgggattataggcgtgatacggcgttcggtttataatttttaataatttaaaatggggataatgggagtatttttttttgttttttatagggtgagttatttttatta

SEQ ID NO: 121 - DNA, 8079 bp, Artificial Sequence
  chemically treated genomic DNA (Homo sapiens)
ttacgttatttttttgttttagtttttcgagtagttgggattataggcgttcgttattatgttcggttaattttttgtatttttagtagagacggggttttatcgtgttagttaggatggtttcgattttttgatttcgtgattcgtttattttggttttttaaagtgttgggattataggcgtgagttattacgttcggtttttttttttttttttttttttttttttagacgtagttttatttttgttatttaggttggagtgtagtggtacgattttatttatttcgtttgtttcggttttttagagtgttgggattataggtgtgagttattgtgtttagtttatattttgtaatgtgtttttatatattttattgtattatgtttaaattaggtgagtagggtaggataatattttttattaattttatagatgagggaataggtttggagagtttaaaggatttgattaaggttatagagatagtaatggaattaagattggttttttggggtcgggtatagtggtttatgtttgtaattttagtattttgggtgaaattatatttttattaaaaatataaaaattagttgggcgtggcggcgggtatttgtagttttagttatttgggaggttgagataggagaatcgtttgaatttgggaggtggaggttgtagtgagtcgagattatattattgtatttagttggggcgatagagtaagattttgttttataaaaaaaaaaaaaagaaagaaagaaaaagaagattggttttttgttatttggtgagatattttttttgttaagttgtttcgttaggttttttattgtttttatttttttattttattatttagtattttgtttttttaattcgggtttttttgtattgagttagaaggtttgagttgtaagttatggtttgttttgagtttttatttaattgatagtggattagaattagttttaatgttttgttttttaattggagaaatataaaatgttttttttatatttttatttttttatttaaaatatttttttagtttgaggtagaaaggagattttagttagagtagaggtgtggtttttaaagagatgggggttggttggtttatgtattgatttatttatttataagatatagaggttattttaggaggtcgaggttggtagattatcggaggtcgggagtttaagattagtttgattaatatggtgaaattttatttttattaaaaatataaaataagtcgggcgtgatgatatatgtttcgtaattttagttattcgggtagttgaggtaggagaattgtttgaatttaggaggcggaggttgttgtgagtcgagattttattattgtattttagtttgggtaataagagggaaatttttttttaaaaaaataaataaataaataaaaagatattgaggaataagatggtgtgtgtgtgtgtgtttgtgaatgtgtgttttttgtttttgggggggaatggagggaaggtgtgagcgaggataaggagtgttggggagattgtttgttaagtttgttggtatatgaggttttttttttaatttgtgtatgtatgtttgtgtgtgtgtgagagagggtattcggaggtggagggataggtgtgtagttgtgtttttatgtttgttttatggttcgtgtatatttagttgggtttagtagagtagtgggtagaaatattttgaaatttttattttttttttgtattttagtattaaaaatatatatattgttgtattttttttgtattcgtatattttagtattttattttttaggaagaatacggaagaaaatattgatggagtttttttttggggagtggggttggggttttaggattttttttttattgtatatttttttgttttatttgaaggttttgttatatatttgtgattgttataataaaatgaggatgaaattagtattggtgaataatgagtgtttgtttgtttttttgaagatatcgtttttattagtttatttattatagggttgagtagattgtgaagtgttgtgaaatatatttttttatttaaattatttatttatttaataaatatttaataaatgttttttatgtgttaggtatagttttagaaattagggataggttaggtatagtggtttatatttgtaattttagtattttgggaggttgaggtgggaggattgtttgagtttaggagtttaagataagtttgggtaatatagtgagattttatttttataaaaaattagttaggtatggtggtattcgtttgtagttttagttatttaggaggatgatgagggaggattgtttgattttaagagtttgaggttgtagtgagttgtgattatgatattgtattttagtttgggtgatagagtaagatattattttttaagaaagaaaagaaagaaagagaaaaaaagagaaagaaagaaagggaggaaggaagggagggaggaagggaaagaaagaagagagagagaggaaggaaggaaggggaaagaaggaagaaagaaggagaaagaaagaaaaagaaagaaagaaagaagaaagaaggaggaaggaaggaaggaaaggaaggacgggagggaggaaggaaggaaagaaagaaaaagaaagaaagaagaaagaaagagaaagaaggaaagaaagaaaagaaagaaagtaggaatatagtagtgaacgattttttattaggtatagaaaaatatgtaataaaattaataagttatatggtgtatgagaaggagaaaaggtaaggtagggaagggtgatagagagtattgggggatggagggttgttatattgaatagggtgattagggaaggtgaagtgtgaataaagatttgaaggaaatgaggagtgagttaggaagttatttgggagaatagtgtttcgggtagagggaatagtaaatgtaaagattttgaggtaagggtatggttgatatgtttaaggaatagttaggaagttagtgaggtggtagagaagtgaatgaaagtaatagaagttggagttagggaagtaagagggtgataggattatttggagttttgtgagttattgtgaggtttttagtttttattttaagtgagatgggaattattggagggttttgagtagaggagggttatgatttagattatttaagttgttgagtggagagtaaattgtagtagggaagggttaggggaggtgtatagagaatttttgatataagtaattttattttagaaagattttattattgggtatattcgtttatgtttgtaattttagcgttttgggaggttgaggtagggggattgtttgggtttaggagttttgagattagtcgtggaaatatagtgagatttcgtttttataatttttttttttttgagatggagttttattttgttgtttaggttggagtgtagtggcgtgattttggtttattgtaatttttgtttttcgggtttaagcgattttttagttttagtttttggagtagttgggattataggagtgtgttattacgtttggttaattttttgtatttttagtagagacggggttttatcgcgttagttaggatggtttcgattttttgatttcgtgatttgtttatttcggttttttaaagtgttgggattatagatatgagttatcgagtttagttaattttttttttattagtttagtatggtggtacgtgtttgtagttttagttatttaggaagttgaggtgggaggattttttgaatttttaaatttgaggtacgagtttgaggttgtagtgagtaatgatcgtgtttttgtattttagtgtgggcgatagggattttgttattaaaaataataaataaataaataaataaagttttaaaaaattttattttatattttaaaaggtattaagttaatagggtttagatgttcgtttaattaatggagataatatttaattagataagggtattattttttattataagtttttattagaggatttaaggattataaaatgattaggattttagtagttagatacggttattttaatagatcgagttttgttattattcgtgtttagtatttggtgtttgtttttgaaggttttgtttaaattaaggatttttttttgtaagtttttgatgattatttttattaggtcgggattttgtttatagtattttttttggattggttcgttaatttttttttttttgatgttaaatgtttttgtgtttgatgtgaaattttaatttgtaatatttatatttttatatataatattatggatggtttgtaatatagtttgatttgtggagtggttttagtttgtatgttcgcggttttgattatcgagtgaataggtggttttaaggagaattgattttttgggaatttcgtgtgacgtttagtttttgtgattgaaatagtattagtaaaaatttgattttgtggatagatataaaggtgggtggatttggttttgtttgattttgagtagtttacgatatgtggatatttgttaggaggttgtggagagtttagaggaggtttagattagggtggtggttttgtaggcggtcgtgagattttagatttggaaggacgaatttatacgagttgttaatggatgggacgtagagtttgagagaaagggaacgatttagatgatttcgagggttttgggtttgagtagttgggaggatgtagttggggaagacggcggggaggaggggagtagaagcgggtgaggtggggaagttttcgagttttgtttggataaggttaagttaaggtgcgtgttaggtattcgaacgttaagtttaggaagggtgtgttttcgaaagggtttcggttggatttttttagttcgtcgtttttattttataggtgtggatttagtagtcgggttttgcgttgggtcgggcggggttacgtggtcgcgggttggcgttttttggcgtcggagagcgcgggcggttggggaatggttgttgttatggtgtcggggcgtagcgagagttgggagcgcggggagtttggtcgttcggttttgtatttttgcgggagtattcgcggcggacgcgaggataggacgttgtacgagcggatcgtgtttcggttgcggcgattcgggatagtgtttatcgagtacgtggcggtcgtcgagttgggcgcgcgcggtgaggttttggggtcgcgggacgcggggacgcgggcgcggatttggttggggtggtagggattcggtttgttcgttttttcgattttcggtagttgcgttttcggcgttcggagttcgtttttttatttcggtgttttatttagcgttttagttcgagaaggaaacgggtcggggttcgggttgcgtgggttttagtaagtttgcgggtgtaaggtagatttagtattattttgatttttggtttttttttggagaattttgtttttagttgtttttagagcgtttgtagggtgtaatagaaagaaggtagattgggttgttttgtttgggtttagtttttattttattcgttggaattttttttattatttaatacgaaaggtatttttttgtttttttattaattttttttgttttgttttgttttgtttttgaaacggaattttattttgtcgtttaggttggagtgtagttgcgtgatttcggtttattgtaatttcgatttttcgggtttaagtgatttttttgttttagtttttcgagtagttgggattataggtacgcgttattatattcggttattttttgtatttttagtagagacggtgttttattatattggttaggttggtttcgaatttttgattttaggtgatttgttcgtttcggttttttaaagtgttgggattatagataggagttatcgtttagggtttgttttttttttttttgtgaagatattagtatttttttagatttggttgattttagtttttattattatttttttttatatttttgttttgttgatataagggtttttttgtcgtttaggttggagtgtagtggtgcgattatagtttattgtagtttcggttttttaaatttatgattttttagttttagttttttattagtaaggattgtaggggtacgatattatgtttggtttaaaatttttttgtagagattgggagttttattatgttgtttagtttggtttcgattttttagttttaagtgattttttcgttttaggtttttcgaagtgttgggattatagatgtgagtttttatgttggttttatatttttttttaggttattattgtgttttgtttttggttgttgggtttttttttttttttttatttatttagttatttatttggaaatagttttgttttattatttatgttggagtgtagtggtaaaattttagtttattgttaatttttgtttttcgggtttgagtaatttttttattttagttttttaagtagttgggattataggtgtgtgtcgttatatttggttaagttttgtattttttatagggacgggattttgttatgttggttaggttggttttgaatttttgagtttaagtgatttgtttgttttagttttttaaagtgttgggattatagatatgagtcgttgagtttggttggatttttttaaagtatatttgatgtgttggtttggaattttgtagatttttttagtttgaaaattgtattttgaatgtttgtgtttttgtttagaaaattttaagtggtttttatttattttatttaagagtagatttataatttgtgggattttatgtaattttgggagatttttttaaaaagataaaaattataatataaagttgttgatggtttggaaagggtttgtgtaagtggaggattttgaagtttatagtttattagtttatggtatatttagattgtttggtggttttttaggtttttagtgttatttgagggagtttgttaaaaatgtaggttttgattatttgggataaagttttcgaatatgtattttttttttttttttaagatagagttttgttttgtcgtttagggtggagtgtagtggagtgattttcgtttattgtaattttttttttttaggtttaagtaatttttttgttttagtttttcgagtagttgggattataggcgtttgttattacgtttggttaattttttaatttttagtggagatggggttttattatgttggttagattggttttaaatttttgatttcgtgattttatcgttttggttttttaaagtgttgggattataggcgtgagttatcgcgtttggttcgaatttgtatttttttttgttttttttaagatggagttttgttttgttgtttaggttggagtgtagtggtgcgattttagtttattgtaattttcgttttttgggtttaagtgatttttttgttttagttttttaagttgttgggattataggtgtgtattattatatttagttaatttttgtatttttagtaaagatggggttttattatgttggttaggttggttttgaatttttgattttaagtgatttattcgttttagttttttaaagtgttgggattataggtatgagttatcgcgtttggttttggaatttgtatttttaataagttttttagtggttttattttgatgcggtgggttgagttttattgttttggaagataatatttaattaagttaagattcgagatttttattttttgggtttaggatgttttttttatttttggttaagtgtttatgtatttttttttaattaatgttatttatagttagtgttgttgatgttttttattcggttttaattatatgttttattttgtatagggttgaatttttttttttgtggttattttattttttcgttgttttgatgagattgttatgtttggttaggttatttggtataaggtttttattttttttgagtagggtgggtatggatatataagggtataggagttattgggagttagtatgaggtatgtttttgattagtttttttttaatatagg

SEQ ID NO: 122 - DNA, 8079 bp, Artificial Sequence
  chemically treated genomic DNA (Homo sapiens)
tttgtgttgagggaaagttggttaaggatatgttttatgttggtttttagtaatttttatgtttttgtatgtttatatttattttgtttagggagggtgggagttttgtgttagatgatttgattaaatatgataattttattaaagtagcgaggaaatggaatagttataaaaagaaaaatttaattttatgtaaggtgggatatgtgattagggtcgaatgaggaatattagtagtattaattgtggatgatattgattagggaaaggtgtatgggtatttagttaaaagtaggagaggtattttaggtttagaaggtagggatttcgggttttagtttgattaaatgttattttttaggatagtgaggtttagtttatcgtattagggtaggattattggggagtttgttagaagtatagattttagggttaggcgcggtggtttatgtttgtaattttagtattttgggaggttggggcgggtggattatttgaggttaggagtttaaaattagtttggttaatatggtgaaattttatttttattaaaaatataaaaattagttgggtgtggtggtgtatatttgtaattttagtaatttgggaggttgaagtaggagaattatttgaatttaggaggcggaagttgtagtgagttgagatcgtattattgtattttagtttgggtaatagagtaaaattttattttaaaaaaaataagaaaaagtatagattcgggttaggcgcggtggtttacgtttgtaattttagtattttgggaggttaaggcggtaggattacgaggttaggagtttgagattagtttggttaatatggtggaattttatttttattaaaaattaaaaaattagttaggcgtggtagtaggcgtttgtaattttagttattcgggaggttgaggtaggaaaattgtttgaatttgggaggaggaggttgtaatgagcggagattattttattgtattttattttgggcgatagagtaagattttgttttgggggaaaaaaaaaagtatatattcgaaggttttattttagatgattagaatttgtatttttaataggtttttttagatgatattaaagatttggagagttattaggtagtttggatatattatgaattaatgagttgtaagttttagggttttttatttgtataggttttttttaaattattagtaattttgtattgtgatttttgtttttttaaagaggttttttagaattgtatgaggttttataaattgtgggtttgtttttgggtaggataagtggaaattatttaaggttttttgagtagaagtataagtatttaagatataatttttaaattggaaggatttgtaagattttagattagtatattaaatatgttttagagaaatttagttagatttagcggtttatgtttgtaattttaatattttgggaggttgaggtaggtagattatttgggtttaggagtttaagattagtttggttaatatggtaaaatttcgtttttataaaaaatataaaatttaattaggtatggcggtatatatttgtagttttagttatttgggaggttgaggtgggaggattgtttaagttcgggaggtagaggttagtagtgagttgagattttgttattgtattttagtatgggtaatagaataagattgtttttaaataaataattaaataaatagaaagagaaagaaaaatttagtagttaggagtagaatataataatggtttgaaagagaatatgaggttagtatgggggtttatatttatagttttagtatttcgggaggtttgaggcgggaggattatttgaggttaggaggtcgggattagattgggtaatatagtgagatttttaatttttatagaaaaattttgagttaggtatggtgtcgtgtttttgtagtttttgttaataggaggttgaggttggaggattatgagtttaggaagtcgaggttgtagtgagttatgatcgtattattgtattttagtttgggcgatagagaggtttttgtattaataaaataaaaatgtgagagagggtaatagtgagaattggggttagttaggtttaaaagagtgttgatgtttttatagaaaaaggggaggtaggttttgggcggtggtttttgtttgtaattttagtattttgggaggtcgaggcgggtagattatttgaggttaggagttcgaaattagtttgattaatatggtgaaatatcgtttttattaaaaatataaaaagtagtcgggtgtggtgacgcgtgtttgtagttttagttattcgggaggttgaggtaagagaattatttgaattcgggaggtcgaggttgtagtgagtcgagattacgtaattgtattttagtttgggcgatagagtgagatttcgttttaaaaataaaataaaataaaataaaaaaagttggtggggaggtaggaggatatttttcgtgttgggtggtggaaaagattttagcgggtgaggtgggaattgagtttaagtaaagtagtttaatttattttttttttgttgtattttataaacgttttgaaagtagttgaagatagagttttttaagaaggaattaaaggttaagataatgttgagtttgttttatattcgtaggtttgttgggatttacgtagttcgagtttcggttcgtttttttttcgggttggggcgttggatggagtatcggggtaggagggcgggtttcgggcgtcgggagcgtagttgtcgggggtcgggggggcggataggtcgggtttttgttattttagttaggttcgcgttcgcgttttcgcgtttcgcggttttagggttttatcgcgcgcgtttagttcggcggtcgttacgtgttcggtgagtattgtttcgaatcgtcgtagtcgagatacgattcgttcgtatagcgttttgttttcgcgttcgtcgcgaatgttttcgtagaagtatagggtcgggcggttaggtttttcgcgtttttagttttcgttgcgtttcggtattatggtagtagttattttttagtcgttcgcgtttttcggcgttagggggcgttagttcgcggttacgtgatttcgttcggtttagcgtagagttcggttgttgagtttatatttgtggaatggggacgacgaattgggaggatttagtcgggattttttcgggaatatattttttttggatttgacgttcggatgtttaatacgtattttaatttgattttgtttaggtagaattcgagggtttttttattttattcgtttttgtttttttttttttcgtcgttttttttagttgtatttttttagttgtttaggtttaagattttcggagttatttggatcgtttttttttttttaaattttgcgttttatttattgataattcgtgtggattcgtttttttaaatttgaaattttacgatcgtttatagggttattattttggtttaagttttttttgggttttttatagttttttaataggtgtttatatgtcgtgagttgtttaaggttagatagaattaggtttatttatttttgtgtttgtttataagattaggtttttattgatgttattttaattataaaagttaggcgttatacggagtttttaagaagttagttttttttaggattatttgtttattcggtagttagagtcgcgggtatgtaagttggagttattttataagttagattgtattgtaaattatttatagtattatatgtaaggatataaatgttataggttaaaattttatattaaatataagaatatttaatattaagagaaaaggggttaacgaattagtttaaggagagtgttgtggatagagtttcggtttgatggggatagttattaagagtttgtaaggaagagtttttgatttgggtagagtttttagaggtagatattaggtgttgggtacgagtgatagtaagattcggtttgttaaggtggtcgtgtttagttgttgaagttttgattattttatggtttttgagttttttgatgaggatttatagtaaagggtgatgtttttatttggttgggtgttgtttttattggttaggcgaatatttggattttgttggtttgatgttttttgaaatgtaagatgaagttttttaaaattttatttatttatttatttattatttttggtgataaggtttttgtcgtttatattggagtgtagaggtacgattattgtttattgtagttttaaattcgtgttttaagtttgagggtttaaggaatttttttattttagttttttgagtagttaggattataggtacgtgttattatgttgagttaataaaaaaaaaattggttgggttcggtggtttatgtttgtaattttagtattttgggaggtcgaggtgggtagattacgaggttaggagatcgagattattttggttaacgcggtgaaatttcgtttttattaaaaatataaaaagttagttaggcgtggtggtatatttttgtagttttagttattttagaggttgaggttggagaatcgtttgaattcgggaggtagaggttgtagtgagttaagattacgttattgtattttagtttaggtaatagagtgaaattttattttaaaaaaaaaaaaattgtagagacgaggttttattatgtttttacggttggttttaaaatttttagatttaagtaatttttttattttagttttttaaagcgttgggattataggtataagcgaatgtgtttagtgatggagtttttttaagatggaattatttatgttaagggttttttatatattttttttggtttttttttgttatagtttgttttttatttagtagtttgagtgatttaggttatgatttttttttgtttaaaattttttagtggtttttattttatttggggtaaaaattgaaaattttatagtagtttataaggttttagatgattttgttatttttttatttttttaattttagtttttattatttttatttatttttttgttattttattggttttttggttgttttttaagtatgttagttatgtttttgttttagagtttttgtatttgttgttttttttgttcggaatattgtttttttaggtagttttttggtttattttttattttttttaagtttttgtttatattttattttttttgattattttatttaatatggtagttttttattttttagtattttttattatttttttttattttgtttttttttttttttatatattatataatttattaattttgttgtatgtttttttatatttagtagaaggtcgtttattgttgtatttttgtttttttttttttttttttttttttttttttttttttttttttttttttttttttttttttttttttttttttttttttttcgtttttttttttttttttttttttttttttttttttttttttttttttttttttttttttttttttttttttttttttttttttttttttttttttttttttttttttttttttttttttttttttttttttttttttttttttttttttttttttttttttttttttttttttttttttttttttttttaagagatggtgttttgttttgttatttaggttggagtgtagtgttatggttatagtttattgtagttttaaatttttaggattaagtaatttttttttattatttttttgaatagttgggattataggcgagtgttattatgtttggttaattttttatagaaatggggttttattatgttgtttaggtttattttaaatttttgggtttaagtaatttttttattttagttttttaaagtattgggattataggtgtgagttattgtgtttagtttatttttggtttttagaattatgtttggtatataagaaatatttattaaatatttgttgaatgaatgagtggtttaaatgagaggatgtattttatagtattttatagtttgtttagttttgtagtaagtaggttgatagaggcggtatttttagggagataggtaagtatttattgtttattaatattgattttatttttattttattatgataattataaatatatgataaaatttttaaatggaataagagagtatgtagtggaaagaaagttttgagattttagttttattttttagaggaaagttttattagtgttttttttcgtattttttttgaaagataaaatattgaagtatgcgagtgtagagaagatgtaataatatgtatatttttaatgttaagatataaaagggagatagagattttagagtatttttgtttattgttttgttgggtttagttaggtatatacggattatggggtaaatatgaagatatagttgtatatttgtttttttattttcgggtgtttttttttatatatatataaatatgtatatatagattaggaaggaggttttatgtgttagtagatttgataggtaatttttttaatattttttattttcgtttatattttttttttatttttttttaaagataaggaatatatatttatagatatatatatatatattattttgttttttagtatttttttatttatttatttatttttttgagagagggttttttttttgttgtttaggttggagtataatggtgagatttcggtttatagtaattttcgttttttgggtttaagtaatttttttgttttagttgttcgagtagttgggattacggggtatgtgttattacgttcggtttattttgtatttttagtagagatggggttttattatgttgattaggttggttttgaattttcgattttcggtgatttgttagtttcggttttttaaagtggtttttgtattttataagtaaataaattaatatataaattagttagtttttatttttttgggggttatatttttgttttggttgggattttttttttattttaggttgaagggatattttgaatagaagagtaaaagtgtagaagggatattttgtgtttttttagttgggaaataaggtattgagattggttttaatttattgttagttgggtgaggatttagagtaagttatgatttgtagtttagattttttggtttaatgtagagaggttcgagttggaggaatagggtattaagtgatgggatggaggaatgagggtagtggggagtttagcgaggtagtttgatagggaaaatattttattaggtgataggaggttagtttttttttttttttttttttttttttttttttgtgagatagagttttgttttgtcgttttagttggatgtagtagtgtgatttcggtttattgtaatttttattttttaggtttaagcgatttttttgttttagttttttaagtggttgggattataggtgttcgtcgttacgtttagttaatttttgtatttttagtagagatgtggttttatttaaagtgttgggattataggtataagttattgtgttcggttttaggaggttaattttgattttattattatttttgtgattttggttaggttttttaaattttttaagtttgtttttttatttataaaattggtaagaaatgttattttgttttatttatttggtttgagtatggtgtagtgaagtatgtgaaggtatattataaaatataggttaggtatagtggtttatatttgtaattttagtattttgggaggtcgaggtaggcggagtgagtgagatcgtgttattgtattttagtttgggtgataagagtgaaattgcgtttgaaaaaaaaaaaaaaaaaaaaaaaaaaggtcgggcgtggtggtttacgtttataattttagtattttgggaggttaaggtgggcggattacgaggttaggagatcgagattattttggttaatacggtgaaatttcgtttttgttaaaaatataaaaaattagtcgggtatggtggcgggcgtttgtagttttagttattcgggaggttgaggtaggagaatggcgtga

SEQ ID NO: 123 - DNA, 6162 bp, Artificial Sequence
  chemically treated genomic DNA (Homo sapiens)
tgttgtaaattttttttcgtatttatttaggtattttaggtgtataggatttttttgagttgtgcgatattttaggtgggtatttttgtgagtttttagtaatgtgtgattttttatttagtatttaatttatgaagtgttttgtattatatttttaatttattttgaaaaaatggttgtaatataaagaaaatgggggagtggttgtttgtagtgtaaaatattttaataaaattggggtttaatatttttttttgttaaaaggaagaaatattttaggttgaggtttttatgttgggggaggagttgagtaggttttatagttatcgttgttttttggtgttttaacgcggggtaaatatttttttagttttttggtatgttaggtttagtattagatattatgtgtagagataatagtttaggtgtagtggtttatgtttgtaattttagtattttgggaggttgaggtaggtagatcgtttgagtttaagattttgagatcggtttgggtaatatgatgagattttatttttataaaaaatatgaaaaatgatttaggtatggtggtgtatgtttggagttttattagtcggaaggttgaggtgggaggattatttgaatttgggaggttatggttgtagtaagttgttatcgtgttattgtattttagtttaggtgatagagtgagattttatttcggaaataaaaaaagagataataatgttgtttttgtttttagtggaaatatagtagaggttatagttatgtgtagtgggtattgttatacgaggagcgtacgtgtattatgggagtatagaggaggggtcgtagttttcgaggggtttggaggtttttgggaaggataagtaggatcggggtagggaaaaagggggtaggagatatgggaggagggaaaagggaggtttttttagttagagggggagtataagttaaggtttggatgagtgaatagtgtggtggtgttaggaagtacgggtgattagtaggaaggggtggggaggagaggattggttataggtagttttaggaggggttgtggataggttggtggagggttatagagtagtgtcgttaggtttggttgagtggatatagggtgtagatagaagtgagtagcgtgggggttagaatggagtgtggtttgagttttgttgttatagggatttgggtttaaattttatttttgttttttattagttgtaggaatttagggaagatatattattgtcgggagttaaaattttttttttgtaaaatagggatttattagaatagagtatatgtttatgatatagtggaaatttaattaaatgaagttatttttttttttaaataggttgtgaaaagttagagtttgttgaataagggttgtatttttggttttgttttgaagatagagtgagattggggtttaacgtggatttagagggttgggtttttatcgttatttggtggttcggtgggaatttgtagttgagttaggttttggtaaggtgaattttcggttgtggtttttttttgagtttgttagtattagtttttttgtataaaatttggttttgttgtttttttgttaatttgttttgtatttagttagggttagggttaagttatttgttttagagtagtttaggtttgtagggagtaagaagaataataagattggttttatttgttgagtagtgattaagagttaggtttagttttaagtgtttttgagtatgttttatttaatttttttaataggtcgggtgtggtagtttatgtttataattttagaattttgggaggttaaggcgggtggattatttgaggttgggagttcgagattagtttgattaatatggagaaattttatttttattaaaaatataaaattagttgggcgtggtggtatatgtttgtaattttagttattcgggaggttgaggtaggagaattgtttgaatttgggaggcggaggttgtggtgagtcgagattgcgttattgtattttagtttgggtaaaaagagtaaaatttcgttttaaaaaaaaaaatttaaattaaaataaaataaaattttttaatagttttatggaggaaagatgagtttagtgaggaaattgaggtatagttaaattattttgtttaaggttatatagttagtaggtgtttaggtttgtttggttttaaagttggtttttttttggttatattatgttgttttttcgaggggttggagggaagtggagggtgatagaggttgttttagaaaggatatgggtttgtggtttttagagtttattagggattggaatatataatgaagttgtgagttggttttattttaagtttagtttttagtagtattattttttaagaaagtggtttgttttttattatgataatttgttttttatagagttagaagagggtttagggattagtgttatttttggttttagtggtttgaaaggatggaaaaggaaaggaagttaagtgaggtttttaggattttgtttgattaatattatataattattggaggtaggttttaatttgttttataatgtagatgaagaaaaagaggcgtagagaggtttgtaaaaggttatgtagttggttagtggtaggttgaaatttgaatttagatatgtttaaggtttgttttggtttaaattagtgggtttggagtaaagtttagggatatggttagttttttatattgtagattttagttttagatcggtttatataagttttaaggttaggaacggttatatggttattttttacgattttttttgtgatcggtataatgtttattatagagtaggtaattgttattgttttattttgaatgtaagatttagataaggggtagagtggttttgaagggatttaagaggttgtagttttaggtttggttgggattagtagtttttaggaaataaagaaaagtagggattagattttgggagagaggatgattttttttttttattcgtgagttttaggaggtaatagtattttttagttaaagtgtaaggagttttagtttgtttaaggttgggattttgttttgagattatgttgttattttcgtttcggttttgtatgatttattatggtgtggaggttttgaaataggttgagtttatatcgttgtattgagttgttggaggatggataattttgtgttatttgggtttgagtatagtggaggtagtagtagtatttgtaggagtgggtaacgatataagttgcggaaggaattcgtagtcgattggtataattacgtttttagtattttagtaattagggagttgttttagatttcggtttaagtttaaattttagtatatgggttacggatggagaagagtgtggggttgattaaggtttatgtttgtattttattgttagaagatagattaatttatgttaagtataggtttgtttttatgtttaggaatagtatttattttattattaaaggatagtgatttttagaataattattttttatacgggtattatatgtagcgaaaaagttaataaagttcgttatacgtttgtttttattggttttggtattaaaagggaagggaatggggggagttagttaggtttgtgatttattttatttttgggaaatagatttagagagttttagggatttgtttaaggtaatataggtaatagttagaatttaaattaatgtttagtttttttatagagtgtgtttttattattgataatttagtgtttttaaagttaggtagagtttttgttatgggaaaggtaagatgtaaattacgatgattttttagtttttttttagtttagtttggtttagtagcgtgttggtttttgtgtgggtgtataataggaagaattaatatagttttgttttagtttatttggggttgtggggagggttttaggtaaattaatttttttttaagttttagtttttttatttgtaaaatgggggttggtttttttttggtattttgcgagtgtgttaagttacgtggtattttttttgttttcggggagtttgtttgatgtggggtattttggaggttgtagggttgacggtttttttggtttattaaggttttttacggagaaatattggttttgtgtttgaggttcgaatttgtagagtaataggggtattaataacgttgggtaagtagatcggtgggttttttgaagtttgaagaattaacgcgtaaaagggaggaggtgagtaggtggtcgtttaaacgttaggcgagggtattagttggatttggaggaattgagatagtgaaaggaaagtaggtaaggttttagtttgggatatgtacgaatcgcggttttttttttttttttatgttttcgtagtttttttcgtttttaaaggaggaatagttcgagggtttttggagtaacggaaggaggattggatgcggggaagggtaaagggcgcggaacggggtggggagtttgcgggcgagttcggaggatattggcgtatttttttcgtcggtttacggtcgtattcgttatattcgaaggcgtcgcgatttttcggagatttcgaagcgtgcgtttttattcgggttttgcgggcgttggcggaaagaggcgaggcggtgtttcgggggcggggtttttttcggttggcggtttcgggtttcgggagttttttaagaggttaggtgaggtcgtttcgtgatgtttcgcgttcggtcgttttggtttgtaacgtgtttttggggcggaggtagcggtagtggagttcgttgcgcgttgttgggggttatttgttttttcgtttgtgtttttttttttagtgtcgcgttcgagtttcgacgggtcgttttaagtttcgatatgtcgtataattacgtggtaacggtttagaagtttatcgtcgtgaacggttgcgtgatcggtgaggttgtcggggtcggagatttcggcgagtgagggagttggggggagtcgcggtttagggaggtcgtcgggggcgtcgggtaggagtgggttcggcgaatggaaggcgttggcggtcgaggaattttttttagtatcgcgatttcgaaagagtcgtttttgtacgcgttttttgggggttggaagtcgttttcgagggttttttttcgttttggggaggttattcggtttcgagaatagggcgggtttagtgagatagaggagtgtgagttggttgtgcggtgtcgtttgggttcggagattggttttttgtggttaggaaaaggcgaggtggtaatgacgattttggggttaagatttttttgtggggaagtttgggggtttaggaggtggagggatgtgaggaatgttcgtattattttatagagggagaggagttttttttaggttaatttttttgtttggggttgttgtttatatgagggttttgttggagaagagggtttggtttgtttggtttagtgttgggtttgttttgttgacgatgcgtttggattgttaaggatatcgatgtttagaattcgggaagagttattttaatttatatttttagttgaatatgtagattttaagtttgtatgtttatatatattttaattatgattttaaaataaaattgttgtttagagttggaggtagttgagtgtggatggaggtattggtagattgttaggagggtagggggtgtggataaaatagtgtttttatataaagttttgggatttttttatttgatttggtttgttagataaaagttttgtgagattttagatgaagattggaagaagtgaatatttttttcggtatttttaattagagtttgttattgtaattgtaatagagtaaaattggaggggtaagaggtatgagaagggattacgtagttattgttatttggaggatatacggtttttaggtttagtttagtttttttagtttgattagggaagtagttttgttgaatgtatgaattgagattttttgaggtgtcggatttggtaagaaggggagtagttggagggagttggagaagtatgtgaagtaaatgagaattttggaggtatttagatataagtgataggattattttgaagggatgggaggttttttttttgagtttaaaagttagagggtttgtttttttagg

SEQ ID NO: 124 - DNA, 6162 bp, Artificial Sequence
  chemically treated genomic DNA (Homo sapiens)
tttgaaagaatagattttttaatttttgaatttaggggaagggttttttatttttttaaaataattttattatttatgtttaaatatttttagaatttttatttattttatatatttttttaattttttttagttatttttttttttgttaaattcggtattttaaagagttttagtttatgtatttaataaagttatttttttaattagattaagaaaattggattggatttaagagtcgtgtgttttttaaatgataatgattgcgtaatttttttttatgttttttgtttttttaattttattttattatagttatagtggtaggttttaattgagaatgtcggagaaagtgtttattttttttagtttttatttaaagttttataaaatttttatttgatagattaagttaaatgaagaagttttagagttttatatgaaaatattgttttgtttatattttttgtttttttggtagtttattaatatttttatttatatttagttatttttaattttgaataatagttttgttttggaattatgattagggtgtatataaatatgtaagtttggggtttgtatatttagttgagaatgtgggttaagatgatttttttcgggttttgaatatcggtgtttttaataatttaagcgtatcgttaataaggtaaatttagtattgggttaggtaaattaaatttttttttttagtagggtttttatgtaaataatagttttaggtaaaggggttagtttgaagagggtttttttttttttgtgggataatgcgggtattttttatatttttttattttttgggtttttagatttttttataggaaaattttgattttaaagtcgttattattatttcgtttttttttggttatagaaagttaattttcgggtttaaacgatatcgtataattaatttatatttttttgttttattgggttcgttttgttttcgaggtcgaatgatttttttaggacgaaaggggattttcgagagcggtttttaatttttaaaaagcgcgtatagggacgattttttcgaggtcgcggtgttgggggaggtttttcggtcgttagcgttttttattcgtcgggtttatttttgttcggcgttttcggcggtttttttaggtcgcggttttttttaatttttttattcgtcggggttttcggtttcggtagttttatcggttacgtagtcgtttacggcggtgggtttttgggtcgttattacgtagttgtacgatatgtcgaggtttggagcggttcgtcgggattcgagcgcgatattagaaagagggatataagcgaaaagataggtggtttttaatagcgcgtagcgaattttattgtcgttgttttcgttttagagatacgttgtaggttagagcggtcgggcgcggggtattacgggacggttttatttggttttttggaggattttcgaagttcgaggtcgttaatcgaaggaggtttcgttttcggagtatcgtttcgttttttttcgttagcgttcgtaggattcggatgagagcgtacgtttcggggttttcgggaagtcgcggcgttttcggatgtggcggatgcggtcgtgagtcggcgggggaggtgcgttagtgtttttcgagttcgttcgtagattttttatttcgtttcgcgttttttgttttttttcgtatttagtttttttttcgttgttttaggagttttcgggttgttttttttttgggaacgggaaggattgcggaggtatagagagggaagggagatcgcgattcgtgtatattttagattagaattttgtttgttttttttttattgttttagtttttttagatttagttggtgttttcgtttgacgtttgaacgattatttgtttatttttttttttttgcgcgttgattttttagattttaaagggtttatcggtttgtttgtttaacgttattagtgtttttattgttttataaattcgaattttaaatataaaattagtattttttcgtagggaattttaatgagttaggagagtcgttagttttgtagtttttagggtattttatattaaataggtttttcgggaataagaggaatattacgtggtttggtatattcgtagaatgttagagaggagttaatttttattttatagatgaggaagttgaggtttagggaggaattggtttatttaagattttttttataattttaagtaggttgaggtagagttatgttgattttttttattgtgtatttatatagaggttaatacgttgttgaattaggttgaattgaggaaaagttagaaagttatcgtggtttatattttgttttttttatagtagagattttgtttgattttggaggtattgaattattagtagtaaaaatatattttgtagaaaaattagatattggtttagattttggttgttatttgtattattttggataagtttttagagttttttgagtttgttttttagaagtaaaatgggttataaatttggttagttttttttattttttttttttttggtgttaaggttagtgagggtaagcgtgtgacgagttttgttaattttttcgttgtatgtgatgttcgtgtaaaagatagttattttgaggattattgttttttagtgatgaagtgggtgttgtttttggatataaaggtagatttgtgtttgatatggattgatttgttttttggtagtgaagtgtaggtatgaattttggttagttttatatttttttttattcgtagtttatgtattagagtttggatttggatcgaagtttggggtagttttttaattattagggtgttgaaggcgtgattgtgttagtcgattgcgagtttttttcgtagtttgtatcgttatttatttttgtaggtgttgttgttgtttttattgtatttagatttaggtagtataggattgtttattttttagtagtttagtgtaacggtgtgaatttagtttgttttagagtttttatattatggtgagttatatagggtcgggacgggaatggtagtatggttttaaagtaggattttagttttgggtaagttaaagttttttatattttgattgagagatgttattgttttttgaggtttacgggtgaagagagagggttatttttttttttagggtttgatttttgtttttttttgttttttggaggttgttggttttagttaggtttggggttgtagttttttgagtttttttagagttattttgttttttatttgggttttgtatttagagtaaaatagtaatagttatttgttttgtaatagatattgtatcggttatagaaggaatcgtgaagaatgattatgtgatcgtttttaattttggggtttatgtgggtcggtttggagttgggatttatagtgtgggaggttggttatgtttttgggttttgttttaggtttattgatttgaattaaaataagttttgaatatatttggatttaaattttagtttgttattgattagttgtatgattttttatagatttttttgcgtttttttttttttatttgtattataaggtaaattaaggtttatttttagtggttgtgtggtgttgattaagtagagttttggaggttttatttgattttttttttttttttatttttttaggttattgaaattagggatagtattggtttttaaatttttttttggttttgtaaaagatagattattatgatggggagtaggttatttttttggagggtagtgttgttggaggttgggtttggagtgaggttaatttataattttattgtgtgttttagtttttggtaggttttgagagttataaatttatgttttttttagggtaatttttgttattttttatttttttttagtttttcgagaaagtagtatgatatggttaaaagggaattagttttggagttaggtagatttggatatttgttggttgtgtgattttgggtaaaatagtttaattgtgttttagtttttttattgggtttattttttttttatagggttgttgggaagttttgttttgttttagtttgggtttttttttttgagacggagttttgttttttttgtttaggttggagtgtaatggcgtaatttcggtttattataattttcgttttttaggtttaagtaatttttttgttttagtttttcgagtagttggaattataggtatgtgttattacgtttagttaattttgtatttttagtagaaatggggtttttttatgttgattaggttagtttcgaatttttaattttaggtgatttattcgttttggttttttaaagttttgggattataggtatgagttattatattcggtttgttgggaagattaaatgagatatgtttaaaaatatttagaattgggtttggtttttagttattgtttagtaaatggaattaattttattgttttttttgttttttatagatttaggttattttgaagtaggtggtttagttttggttttggttggatgtaggataggttggtagggaggtagtagagttaaattttgtataaaggagttggtgttagtaagtttaggaagaagttatagtcggaagtttattttgttaggatttggtttagttgtaggtttttatcgggttattaggtggcggtgggagtttagttttttgagtttacgttgggttttagttttattttgtttttaggataaagttaggggtgtagtttttgtttagtagattttggttttttatagtttgtttgaaaaagggagtagttttatttgattgagtttttattatattatgggtatatattttgttttagtaaatttttattttatagaggaagaattttagttttcgataatgatgtattttttttgagtttttgtagttaatgagaggtagaagtgggatttgaatttaagtttttgtaatagtagagtttaagttatattttattttggtttttacgttatttatttttgtttgtattttgtatttatttagttaagtttggcggtattgttttgtaattttttattagtttgtttataattttttttgaggttgtttgtggttagtttttttttttttatttttttttgttggttattcgtgttttttggtattattatattatttatttatttaggttttggtttatgttttttttttggttggaagagttttttttttttttttttttatgttttttgttttttttttttttatttcggttttgtttattttttttagagatttttaggtttttcgggagttgcggttttttttttatgtttttatggtgtacgtgcgtttttcgtgtagtagtgtttattatatatggttgtgatttttgttgtgtttttattgagggtaggaatagtattgttatttttttttttattttcgagatggagttttattttgttatttaggttggagtgtagtggtacgatgatagtttattgtagttatgattttttaggtttaagtgatttttttattttagtttttcgattagtgggattttaggtatgtattattatgtttggattattttttatattttttgtagagatggagttttattatgttgtttaggtcggttttaaagttttggatttaggcgatttgtttgttttagttttttaaagtgttgggattataggtatgagttattgtatttgagttgttatttttatatatagtgtttagtgttgggtttggtatattaagaggttggggaaatgtttgtttcgcgttggagtattagggagtagcggtggttgtggaatttgtttagttttttttttagtataggagttttagtttgaggtgttttttttttttgatagaagaaggtgttgggttttagttttattaaaatattttatattgtaggtaattatttttttattttttttgtattgtagttatttttttagaataaattgaaggtatggtgtaagatattttataaattaggtattgaatagaaagttatatattattgaagatttatagaaatatttatttaagatgtcgtataatttaaggaagttttgtgtatttggagtatttaggtggatgcgggagagggtttatagta

SEQ ID NO: 125 - DNA, 3630 bp, Artificial Sequence
  chemically treated genomic DNA (Homo sapiens)
gtagtcgggaaggttttcggtttacgtgtaggtttattttaggaggatttcgatggtatttttagtagagaagggtttattatgttggttcggttggttttgaatttttggttttaagtgatttatttgttttaggtttttaaagtgttgggattataggtttgagttaatgcgatggtttattattaatgtatttttgtatatttttttttatttttataaattgttaggtacggggtttagtgggtggaggaaaggtttagtaatgtttgagtaagtttaatttttgtttgttttttcgtagaaattagggtgtatttaaattgtttttttttaggttaggtaggatagcgcggttttatttgtgaatttttaagatttggattttggttgaagcgagggcgtaggagttttaagtatcgttggttgtacgttttttggtttattacgttttaggttgtttttaggtggatatttaataggttaggtaagttttagttaaaagtagtgagaggttaagaggttgggtatggtggtttacgtttataattttagtattttgggaggtcgaggtaggtagattataaggttagaagatcgagattattttggttaatatggtgaaattttgtttttattaaaatataaaaaattagttaggcgtggtggtgtgtgtttttagttttagttgtttcggagattgaggtaggggaatcgtttgaattcgggaggcggagattgtagtgagtcgagattgtgttattgtatttcggtttgggtaatagagtgagattttgttttaaaaaaaaaaaaaaaaaaaaaaagtagtgaggaggttgggtatagtggtttatatttgtaattttagtattttggtagatcgaggtggatggatgttaggagttttagattagtttaggtaatttagggagattttgtttttataaaaaatgtaaaaattagttgagtgttgcggcgcgtatttgtagttttagttattcgggaggttgaggtgggaggatcgatgtttaggaagtttagtttgtattgagtttatattttgttattgtattttagtttgggtgatagagagaggttttgttttaaaaaaaaaaaaaaaaaaaggaaagagagaaagaaagaaagaaaaattaaaaatagttaacgattaaataaataaaagagtagtgagaattagatacggtggtttatgtttgtaattttagtattttgggaggtagaggtaggaggattatttgagtttaggaggtttagattaacgtgggaaatatagtaagattttgtttttataaaaataaaaataaaaaaattaggtttggggatataggtttgtaagtttatttgggaggttgaggtgggaggattagtgaaatttgaggttaaggttgtagtgagttgtgattatattattgtattttagtttgggtaacggaagagagatattgtttttaggaaaaaaaaaaaaaaaaaaaaaaaaaaggtaaggagttttaattattttttttttatagagaagtagtttggattcgatgggattgtagtttttggaattcgattgtaaagttgatcgttggtagagtttagtttttaatttaggaaaggtattagttttttataaagtcgttattttttaattatattttgtagggattagttaattttaaagttcgagcgggcgttattattaattgtaaggcgggaaatagagttttggttggtatcgggtttttttttcggattcgtagaggtttggtagcgtcgcgtttgaggagggttcgtgttaggaagttaaggttggatgatcgtttaagtttaggagttaaagatcggttcggataataaagcgagatttcgtttttttagaaaaagaaaaaaagagagagagagagagaaattagtcgggcgtggtggcgtacgtttgtagttttatttatttaggaggttgaggtgggaggatcgtttgagtttaggaggtggaggttgtattgagttatgatcgttttattgttttttagggtgggcgatagagttagattttgttgttaaaaaaaaaaaaaaaatttataaagtcggggattatttttgttttagggaggttagttgattcgggttggtattggttttggggtagttttcgtttttttcgggagcgttggtatcgttttttggtattatttttttttcgcgttttcgttttttaggaaggggcggggttttcgagacgggtggggtcggagttttaagttggtttgaataagttttgggtatgtttggcgggaagttggtttagttcggttatttgtggtttcgtagttttgtagttttcgttttgtttttttttagaggttttttaattttttttttatgattttcgtatagagtatagtatttttttatacggaggacgcgatggtttttaagaaacgtttagaaatttagaagattttcgagattgtattacgttttaggaataagaggagtaggagttttttggagttggagttcgaggttaagaagttttgtgcgaagggtttcggtattgtttgtgtttgttgtttgaatattttcgttttttagggtgttcgcgtaggaggttgtagcgggggatgggtgtttcgaggttttcgaggttcgcgtaggttacgggtgttttcggttgtgtattttatttgtaggttttttgatattagagtgtttaggttttaatatttttttcgttaggtaataggaagtagatgagtttcgtaataatagatatacggatttgttagattttttgttcgtattagggtttttgtatagttaggacggttttagagaattttattttttttggcgttgtgtgtgttggattttatagttacgtttgttagttgtacgttttcggtggttagttgtgagagtttttaatttttttttttttagaaagtttattttttgaggtttattggggtttgaatttggggttataaggagtttcgagatatttaaaaacgagttggggtttgttaattaagtggtttttgtttatgagaagaaagaattggttgttaagacgtcggatttatagtgattgggtttttaaatatagtttggtgattaggagttgttgttttattgttattttaattttatttatttttttagaagtaatttagttaagagtatttttaggtttttttattttttttttttttaaacggtgatttttgttatgttgttttaaaatttttttattgtgtattatatgtgatttataaaattgtgatttagttttatttcgagttttgtagtttaaattgggaagagttttgtattgtattttatttttgtgtgtttttttggttggggttttaggaattttgtacgattgtatttatttttattttagatttattgttcgtgggagtgttttggggaaggggttaaatttttatttatttttttatttttggtgttcgttgagattatatagatatggaaaggtcgtaggaggtgatgagatagagattaatcgtgtcgaatgaaataaggttttttttcggggaatttagtagaaaaatttttcgtgagattggagaggaaaatatgtttggtttgtttggtagg

SEQ ID NO: 126 - DNA, 3630 bp, Artificial Sequence
  chemically treated genomic DNA (Homo sapiens)
tttgttaagtagattagatatatttttttttttaattttacgaaaggtttttttgttgaatttttcgaaaggaagttttgttttattcggtacggttaatttttgttttattattttttgcggtttttttatgtttgtgtggttttaacgagtattagaaataaaaaaatgagtgaggatttggttttttttttaaaatatttttacgaatagtaagtttgaagtgaaagtaaatatagtcgtgtagggtttttgagattttagttaaagaaatatataaggataaagtataatgtagaattttttttagtttgggttgtaaaattcgagatgggattgggttataattttataaattatatataatgtataataaaaagattttagggtagtatggtagaagttatcgtttaggaaaagaaggaataggaaggtttggaaatgtttttaattaggttatttttggggaggtaagtgaaattagaatagtaataaagtaataatttttgattattaaattgtatttgaggatttaattattataggttcgacgttttgataattaattttttttttttatggataaaaattatttgattaataagttttagttcgtttttgagtgtttcgaaattttttatagttttaggtttaagttttagtaaattttagagaatgagttttttaaggaggaaggaattgggggtttttataattgattatcgaggacgtgtagttaataagcgtgattatgaaatttagtatatatagcgttaggaaaggtaggattttttgaagtcgttttaattgtgtaagaattttgatacgaataaggaatttgataagttcgtgtgtttgttgttacggagtttatttgttttttgttatttagcgggagaggtgttgaaatttaaatattttggtgttaaaggatttgtaggtagaatgtatagtcggaggtattcgtgatttgcgcgggtttcgggagtttcggagtatttatttttcgttgtagttttttgcgcgagtattttaaaaggcggaaatatttaagtagtaggtataggtagtatcggagtttttcgtatagagttttttggtttcgggttttagttttaggggatttttgttttttttgtttttggggcgtaatataatttcggaggttttttgggtttttgggcgttttttgggagttatcgcgtttttcgtgtgaaggggtattgtgttttatgcgaagattatggagggaggattgagaggtttttggggagaaataaggcggggattataaaattgcggggttataggtagtcgagttaagttaatttttcgttaaatatgtttagggtttgtttaaattagtttggagtttcggttttattcgtttcggagatttcgtttttttttggaaggcgggggcgcggggagggggtggtgttaaggggcggtgttagcgttttcgggaggggcgggaattgttttagggttagtgttagttcgggttagttgatttttttggagtaaagatggttttcggttttatggattttttttttttttttagtaatagggtttggttttgtcgtttattttggagggtagtggggcgattatagtttagtgtagtttttattttttgggtttaagcgatttttttattttagttttttaagtagatgggattataagcgtacgttattacgttcggttaatttttttttttttttttttttttttttttttttggagagacggggtttcgttttgttgttcgggtcggtttttaatttttgggtttaagcgattatttagttttgattttttgatacgaattttttttaaacgcggcgttgttaggtttttgcgggttcggggaggaggttcggtgttagttaaggttttgtttttcgttttgtaattggtgatgacgttcgttcgggttttgggattggttggtttttatagggtgtagttggggagtggcggttttgtagagagttagtgttttttttaagttagaagttgggttttattagcggttagttttgtagtcggattttagaaattatagttttatcgaatttaagttgtttttttgtgaagggagaatgattggaattttttgtttttttttttttttttttttttttttttttagaggtagtgtttttttttcgttatttaggttggagtgtagtgatgtaattatagtttattgtagttttgattttaagttttattgatttttttattttagttttttaagtaggtttgtagatttgtatttttaagtttaatttttttatttttatttttgtagagataaggttttgttatgttttttacgttggtttggattttttgggtttaagtgatttttttgtttttgttttttaaagtgttgggattataggtatgagttatcgtgtttggtttttattgtttttttatttgtttggtcgttggttgtttttaattttttttttttttttttttttttttttttttttttttttttttttgagatagggtttttttttgttatttaggttggagtgtagtggtaggatgtgggtttaatgtaggttggattttttggatatcgatttttttattttagtttttcgagtagttgggattataggtgcgcgtcgtaatatttagttaatttttgtattttttgtagagatagagtttttttaagttgtttaggttggtttagaatttttggtatttatttatttcggtttgttaaagtgttgagattataggtgtgagttattgtgtttagtttttttattgttttttttttttttttttttttttgagatagagttttattttgttgtttaggtcggagtgtagtggtataatttcggtttattgtaattttcgtttttcgggtttaagcgatttttttgttttagttttcggagtagttgggattagaggtatatattattacgtttgattaattttttgtattttagtagagatagggttttattatgttggttaggatggtttcgattttttgattttgtgatttgtttgtttcggttttttaaagtgttgggattataggcgtgagttattatgtttagttttttggttttttattgtttttaattaagatttgtttaatttgttgggtgtttatttaggagtaatttgggacgtgatgggttagagggcgtgtagttagcggtatttagaatttttacgttttcgttttagttaaagtttaagttttgaaggtttataggtgaggtcgcgttgttttgtttagtttgagaagagatagtttggatgtattttagtttttgcgaagaggtaggtaggagttgggtttatttaggtattgttgggttttttttttatttattaagtttcgtgtttgatagtttgtgggggtgggaggagatatataaaaatgtattaatggtaggttatcgtattggtttaagtttgtaattttagtattttgggagtttaaggtaggtgaattatttgaggttaggagtttaagattagtcgggttaatatggtaaatttttttttattaaaaatattatcgggatttttttagagtagatttgtacgtagatcgaaggttttttcgattgt

SEQ ID NO: 127 - DNA, 73334 bp, Artificial Sequence
  chemically treated genomic DNA (Homo sapiens)
tttttaattttaaaatatttagatttgtgttttttatatagcgtataggttttgtgttttatgttttgtagtgattgggttgagaatatgtttttgttaaatatagtatgttgatatttgaaaatatggtagaagttggaaagttatttttatttttttttttttttttttttttgatgcgggttataaaattttggaatgattttttgaattttttttgaagtaggttttaagatttttatgtaagaagtgttgtttatatttatagtatttatttttataggaaaggtatttttttatttttgaagattgacgggttatagagaaaaatttgaataaataagttttgttaaattttttttaagtttatttttatttttgtttaattgtatttttttataattgtttattttttatgaaatttggtatagaaatatataagtttaatagtttttttgggtttttttttttttaggaaggtttttatgttatgggaaatttatatgtaatgtttatgttttgtttttgttaattttttattatggaggttttagttatgaatttaggatgggtatagaaaagttattttttattttttatagtaatttcgtaataggtatttattgattaatttattaaataggtttagttaaagtgcgaatgtttagtgatataatgaagagttgttatttttaggtttttagttagggtttgttttgtagtgagggagagaaatttattgaagttagtataggtaaagggatgattgttgtaaggatatggggtaattttgtggataattaagaatagaaaaaatatatagttagttaattttaaaattaggtttaaaaataaaaaataaggaatggaagttttttttttttttatagaataaataatagttttttaacgttattttgtttttttttgttagttaattttttttgttatttatatattttttttttttaagtaattttagttggtatgagggttttagtttttgttgtatagagatgttatagttttttagtgttgtaattttaaattttttagtaatagtttgattggtttagttagggttaggttattatttttggtttaattagttgtggttagtaatggaggttttagtataaatatgtttttttaggtgtatttttttagtagagtttagggagtgagtatatcgggggtagggtagaagtggtagtttttatgtagtatttataatatatttttttttttttatgaatttttattttttgtagttattttttttttggtttttttttttttacggtggtagattaaagttttttattattatttgtttcgttttttaaagtgtttttggtataaaaaatatttttattgtttttttttttagtttaatttatatttttttagttggaatgttttaatgggaaagtaatgtggtgattagagtgtagaagtttttgggattattttattttatttttaagttattagtttgggttaggagtaagaatattataagtaagaggttattgtaaatggagttgaagttaggttttattttttattagaagagatggttttgtgtatgagtttttgtatttgtgaaagtggaatattattattgtggattatataagattattgtgagaattaaagggaataatttaggttaaggagttagtttagtgtttggaattttaatacgtattatttataattgaggtataagaggtaaatattaaagttatggataagatagtgttaagggcgtgatggtatgtgtttgtaattttagttatttatgaggttgaagtatgagaattgtttgaatcggtgaggtaaaggttgtagtgagttgagttgagattatgttattgtattttagtttgggcgattgagtgagattttgttttaaaaaaaaaaaaaaaaaaaagaaaagataatgttaaatgttggggtgttaaataaggattggaaattaggtgggtggtgtttgaattaattttggaagtaggagttttggtataatggtttttataacgtggattttaagatagttgattttatttgttgaattttgaaggaaggtttgataatgttaggaattttgtagtatttagttaattgatttgtttttttttagaatgtaaagatttaatgtaaacgatgtaataatttttatttaaataggttattttttattttgcgatattatttgtgattgggttttatattataattaaaattgtgttttagagtaatatatatttgggttcggtggtttacgtttgtaattttagtattttggtgttattgaggtggttggattgtttaagcgtagaggtcgaggttgtagtgagttgtgtttgtattattgtattttagtttgggtgagagtgagatgtagttttaaaataaataaattaaaattatatatatatatatatatatttttatatataaataaaaattggattatttataattaattttatgatttaattaaaaagagggtttgtattgaaatatttgtttttttggaaattttttgggtattttataaagtgaatattttattattgtttaaaatattattaagatagttttatgtatatgaatgttaggtaaaatgaatttttataaatataagtttggatttttatgttatatatgttttttatttaggtttaatttaggtttaaatatggtgttattttatatattgtaaagttggatgagtttagtaattttttattaattattgaattaaaaagatagaaaattgggatatggtaagatattaattattaataaatattaaaaatgattttttagcgaatatgtaaaaggatgtgggtattaaaatagataattttttttaagaaatatatattttaattgttttttttgttgataaatgtagaatttaaacgttaatttattttcgatttgttattatagaggtgatttttttatggttaaggtgttacgatgagtgttttttaggtatgtatttttttatttaggatttgtttttgatttatttatgttatattatgtatatattaaaaatatatcgatttttttgttgtaaaatagaacgaaattatgttttttgtagtaatatggatggagttggaggatattattttaagtgaataaatttagaaatagaaaattaaatattgtatgtttttataagcgggagttaaataataggtatatatgtatataagaatgggaataataagatattggggattttaaaaagggagagggtgggaagggggtgagggttgaaaaattagttattgggtataatgtttaatgtttgggggataggtatattagaagtttaatttttattattatataatatatttatgtaataagtaagtatatgtattttcgaatttaaaattaaaaaataattaaaaagtatcgatttttttaattggtatggaatagtttcgagaatggatgtaaatatcgaattttttaatgtagttgtagattttgttagttttgttttaatttttggatcggtttttttttttaattatttttaatttttaaatagattgttgttattgttatgttatatatttattgtattatttataaatgtataatttttgtaaattagtttttgaattgaaagtatttattggtaaaacgggtatttttttattataggaatagttggatatgtttaaatatttgagagttatttttattataagtatatatagttttgtggtgttttttgttgagatagagtttcgttttgttgtttaggttggagtgtagtagtgcgattttggtttattgtaattttcgttttttgggtttaagtaatttttttgttttagttttttaagtagtcgggagtatatattaatttttgtatttttagtagagacgggtttttgttatgttggttaggttggttttaaatttttgattttaggtgatttattcgttttagttttttaaagtgttgggattagaggtgtgagttatcgcgttcggtttgtagtgtgtttttgaacgtatatgtgaagttgtagtttttttttttttttttttgagacggagtttttttttgtcgttaggttggagtgtagtggcgcgatttcggtttattgtaatttttgattttttggtttaagttattttgttttagtttttagagtagttgagattataggcgttcgttatcgcgttcggttaaacgttttgtatttttagtagagacggcgttttattatgttggttagaatggtttcgattttttgatttcgtgattcgttcgttttggttttttaaagtgttgggattataggtttgagatatagcgttcgatttaagttgtagttttatgattatgatttatggttgtgaggtattgatttaagatattttaaagtttaagtcgttagattttagaagaaaaaaaaatttattaagataagttaatgttattgttataaatgggagtttggagaaaattttattaatatttgtttgggtggtttatgtatagcgttgaattgatttgaatttcgattaaatattgtatggaattaatgtacggtaggggaaattattaattgaagatgttttttttgttgttattgtttagaacgtagttagaaaattttattttagaggttttatttcgttgataaagttttaatttttttttaaaagaattaatttttattttattttttttatattttgaatagaatatggaagaagttagcgtttttttttcgcgggcgttgttgtaattttgttttcgtcggggttttcgcgcgaaatcgggaatattggagtagtatcgatttcgttcgtttagaattcgttttagtcgggtttattttcgttagagttttggtcgcgttcgtttcgttttacggattcgagattcgtcggaattttttcgcgacgtcgcgggagcgcgcggggtcgttagttaggttttagaatgtattgttgatacgtgtgcgcgcgcgcggttttattgtcgggcgatcgcgggaaaattttaaaaaaatttaaaaagttaatacgaggtaaagttaaatttttaagttatagatttcgggcggtggtttttttttcgttattgtttaaattgttgaagtagttttcgcgaggattattcggtaagcggtaggtcgtagaacgtagcgagggcggaggtttttttcgggggtttggtcgatacgttagcggcgagagcgggaggaggaggcgaggggtaagagggaaggttcgcgagagcgggtgggttaggcgcgttttgcggtgggcgagaggggttttcgtcggcgtagggttgtggttaaggttgaggcgggaggcgggaggcgggaggcggaaggtggcgggcggtgttagttcgcggggcggggttagggcggggaaagcgggggcgggagtcggcgttggggtcgcgcggaagggagttttcggagaggcgggagtcgggtgttggcgttttggttttttttgtttattgagcgtaggtagttatgttttttttaaaggagaggagtaaaggtgaatttttttgtttcggattcgtgggagtcgtgaaaagttcgtttttttgagtcggtcgttttttatagttggtttcgtttttttcgttttttatatttttgtttttaaattttattcgtcggggcgttaggaggggcgaggtttaattagaggagttcggggcgcggttgttatttttttcgtttttcgttttttattttcggagggaggcgggttcgtagaggttagtgttttttttttattttttttgtggacgttaggttatatttttaaagttcgtgagagattttttaggtgttgtttgttggtttgttttttttaattttttaggtgggtgcgtttataattacgaattttttatgattttatgtgtttagcgtatcgaatgggggaaaagatttggagttttataatatgggaaattgggtattagaattttaagggaagagattaaggagttttttagtaaagttttgtatgtgtttggatttttgttttaatttgaaatttggaaaattttcgggtatttgattttattttaatttgtgttttatttaatgtatttaaattgtgatgtgatttgatttagtatttattaaatgagtagagtatttttgggttatttaattttagttttttgtggttgttatttattgttagtgatatgtttttagatagatcgttttttttttatttttttgaaaggttgttataaatagtagaatttatattatgtgttgagattatttattatttaagtttagatggaaaatatgtttattgcgattttatatattaaatttgaattgatgttttaatgttatgtgttgtattagagttatttggaaataagtatttatatatattatttatatataagaaaggttgtatcgaaaaagaatttgtttttttagatatattagagattttttttattaatttattatttttagtaatagagtttgttttttgagaattggattaattatattttgtatattatatattcgaatttatttttgttttattcggttatatttttttttgatttttttaaaaacgtttattaaggtattagaaaagaaaagtaggttttatattggtattttttgttttgttttttaataaaaagtattaatttgattgattggttggttgtggaagatgtgttgttgtatgtatgtgtaattgtgtatgtatattttaaaataaatggtatttttaattagttttatattttagtaggtagttttaataataattatataaatttcgtgtttatgagaattagttatagggaggttagtttggttagtagaaagttggattgattatttgggttatggagagagttagaggaaatttatatgagtggtagttttaagttggtagtgttagggttttaaatcgggttggaaatgagtattaaatgatttttaaaagttttattttaggttgggatatgtgtattttttgttttgtttgtggattttgagtgattgatttaatgtgaaaaaatatatataggagaagtattttggaagttttgtaatgttttaataaaaatgtagaagtggagaaggaaaggtaatttagataataggtagagtatggtggtttatgtttgtaattttagtattttgggaagcggaggcggaaggattatttgattttaggagttcgagtttagcgtgggtaatagagagagttttgtttttataaaaagttaagaaattagtcggttatagtgatgcggggttgtggttttagttattcgggaggttgaggtggaggattatttgagtttaggaggtcgaggttatagtgaattgtgattgcgttattgtattttatattgggtagtagattgagatcgtgtttggaaaaataaaattggtaataatttagattggttattagagttggattgggggttagtaggtaatggttttatttttattttgagattggtattttttaatttaagtttaatacgggattgagggtaagagatttgtatgttttttatgttagtattatattattttgattatggtagttttatagtaagttttgaaattaagtagtgtaagttatttaatgtttttttttatttttaaaattgttttggcggtttagggttttttatatttttatataaattttagtattagtttgttatttttttttagaaaatcgtgttgtgatagattttgtaggaattgtatttaattttgtatatttatttgggggagaattgttattttattatgaatatggaatttttttttatttgttgagcgttttaattttttttagtagtatttagtaatttttagtgtataaattttgtttttttgtaaattaattttgaagttttatttttgatggtattgtgaattgaattatttttaaaattttattaaaattttttttatcgataaagtgaaagtaagttttttgttttttttttgagatagagtttcgttttgtttgtttagattggagtgtagtggtacgatttcggtttattgtaattttcgtttttcgggtttaagcgatttttttgttttagtttttcgagtagttgggattataggtattttttattacgttcggttaatttttgtatttttagtagagacggggttttattatattggttaggttggttttaaatttttgatttcgtgattcgtttgtttcggttttttaaagtgttgggattataggcgtgagttattgcgttcggtcgaaagtaagtttattaagaaagtaaaggaataaagaatggttattttataggtagagtagtcgaattatttttaaaattttattatggattgttgttagtatataaatatatatttgattttatttattaattttatattttgtaattttttttgttgaatttgatgattatttttagttttttgtgaattatataggattttttatatacggtattatgttaatatagttttatttttttttttatgtggatgtttttagttttttttttgtttgattaattttttttttatttggttcgattttttagtattttgttgaatagatatggagtgtatattattgatttattttttattttagggggaaaatatttaattttttattattagatacgacgttagttgtaagttttttataaatgtattttattaggttgagagattttttttttgttattagattgttgagaatttttatgaataaatgttagaaatgttgtttttttgtatttattgagatgattgtggttttgtttttttattaatatgatttattaattgatttgtgtatttatattaattttgtattttaaattttatttagttatgttatataattttttttatatattgttggatttggtttagtaatattttgtttaggatttttgtattatgtttatggtaatattagtaatattttgttttgtgatgtttgtttggttttggtattatcgtaatagtggtattttagaatgagttgggaagtgtttttttttatttttttagagtttgtgaaggattggtatttttttttttttaaatatttgatagaatttatttataaagttattagttcgtggatatttttttatagggaaatttgaaattataaatttaggttttttagcgtacgtatgcgtgtgattttttcggtgaaggttgtcgtgcgcgtatttggtcgtgatttttttagagcgaggttgtgtatatatgcgcgcgttttttttatcgttagtttttatatattttttttagtattggtttttaggtatatacgtgacgtttttttagggcggagtttttatagtgtgtgcggttttttagcgtttatttttggtgggtgtgttttgttagcgttagttttttggggtgtgtcgtttttttaacgttggttttcgtgtttgggtgtcgttttagtatttgtttttaggcgtgtgtacgtttttagcgttaggtttttggtatatgtgtttttgtagcgtcggtttttgtggtgtgtattttttttagtgtaggtttttgtagtgcgttgtgattagttgtatttaatggttaattgtgtattttagtattttttttaggcgattttgtaattgagtttgtggtgggatatttttttgtgaatattttttttggcgttttagaggatgggtttttggtaagttattaaaggtggttttttagtaagttgtattggtatagtatttatagagatatttttcgtatttagtgagttatggttgtgttttttttaaaaagtttttgattttatttttgggaagaagtgggtatttttttttagggtatttattttagttttaggggtagtggtttttttttatattttttatttttgtgttttgtagaattttttgtattttttattagttagtattttgttattttagttttgttatagtgaatagtttttgattgggtatggtgatttatgtttgtaattttagtattttgcgaggtcgtagggtttgggagaattatttgagattaggagtttgagataagtttgggtaatatagtaaaatttttgttttatagaaaatacgaaattatttgggagtggtgtgtgttttatttattacggaggttgatgtgggaggatcgttgagtttaggaggttgaggttgtttggagttatgattatattattgtattttagtttgggtaatagagtgagattttttttttaaaaaagaaaatgataataataatagtaattatttatagttgattttttttatttaaattattatgtggtttttttttattgattggatttagattgatttattatttttgttttgaatttttttaagaaattatgagtggtgagagtatttagtttgtttatttttttgaattgtgaaagttaattttaaggttttttttatttttatatgacgaaagatacgtttgtgtgagagtatgtaggtttttatgaagtgatgaaattgtttttttatgtttttgtaaattagaaatagtatagattattatggaaagtggggttagagattaggaggggaggagaagaggataggattagaattgtggtcgattttatggtatttagtgggtagggtttttagatgatttgattttagatgtgattgtattttttattattttttatttttgttttttattttttagatttttgggatttgtgtttttatttttttttagagttttaatgatgtttttgtaatttagaaatatttatgtgtgatataaatattttatatatatttagttattttagtggaatttgagatttgttattttggtgattatttataagatagtttgaggttgcggttttttatatatatatatatatatatatatatatatatatagatttagaggagattatttaaataatatgaatttggttgggtgtagtgttgtgtatttgtagttttaattatttgagaggttgaggttggaagattgtgagtttaagttttttgggtaaaattgtgagattttatttttagggaaaaaaataaataaataaaaggttatgattttatgtttgtgattttttttttatttggtttagtttaaaggtatggaattgttagatatttttgttttttttataagattttggaggtgttatttattttagtgatttttaatatttttttatggttggtttttttttgttgttattttgtttttgttggttgttattgtttatttaaagttataatattataaggtattgtatttagtttaattttatttttgtaattatgtttgtatatttaagtgttgtatttaatagatttttttattaatttttgattttttttttttttttttttttgagacggaattttattttgtttttcgggttggagtgtagtggcgcgatttcggtttattgtaagttttgtttttcgggtttatattattttttttttgagtagttgggattataggagtttattattacgtttagttaattttttgtatttttgttagaggcggagttttatcgtgttagttaggatggttttgattttttgatttcgtgattcgtttgttttggttttttaaagtgttgggattataggcgtgagttatcgtttttggttaacgtttgatttattgatgattatttgtggttatgtataatgattttttttttgtttttgtgtattgtagtttatattattgttttatgtgtatatgtttgtttttataatttttagttaatttttttagggtatatttttttttattatataattgtattgatgtttgttgagtgttaatattttttttttttttttttgttataatagattttagatttttttttagtagttattattttatgggttttggggaatattgatattatttttagtttttgggggtggatttttattggtttaaggagtgtgttttattgattcgttatagttattggttaaggatgggtataagtttaagtaagtttagtttgaatatatttgaggtttgttttttatttgggatgttggaatagaagtatgtattttatttttgggtggtatggatgtgatgtgatttttgtaatggttaaagttgttttgttattatgagggaagtaggatggagagatagattaattgtgaagtttgttttgtttttggatttgttagttttttgaattaacgaatttttttttttttttttttttttttttttttgaaatagggttttgttttgttaattaggagtgtagtggtacgaatatagtttattgtagttttaaatttttgggttttaggaattatgttattttagttatttgagtaattaggattataggtatgtattataatgtttggttaattaattattattatttttgtagagatagagttatgttatgttatttaggttggttttgaatttttagttttaagttgtttttttgtttgggttttttaaagtgttgtgatgagaggtgtgagttattatgtttggttttttattattgttttagttggttttgtttggtgtagtaggggtatttaatgtttattaaatatttagatttttttttatattttttagtttatttgtagttaggtaggatattgtgattgttttagttaatagattttaagtaggttatttttaggtagaagtatttagtagtagatttttgatttagttattttttttttttgtaatggtgattttggaggttaggtgttgagatgtttgagtatttgttatgttggatttatgagtgattgtggagtagaataatatttttattttataaatatgtgtgttttatataatatgttggatatatagtattagaaaaaagttattatattataatttagtttattttgatgaatagagttgggtttttaattattggaaattaaaggtattttaggtgatatagtataattttgtaatttttagtgtgtatttggtgatttataatgtatgtagattatatattgtaattgattagtaagatatttgtttgaaggaattagttatatttagttttagttttttgaatttggtgtatttaaatatgattttgtttaatatggattgtaacgattatttagtttatttatttttatatattaaagattataataaaatattatataaaatatatatttatataaataatatcgaattgttgtttttgtttgaagtcgttagttaggaatttttaattataggtcgtaagagtgagtaatcgtttattattggtataatagtatgtattttatttatgaagtagtattttttgtagtatttggtatttagaagagtattttgtgtttttgatattgattagtattattagaatttttagttattatattaaaaaagttggtaaagttagtgaaatttttgtttgatgataagtattttgataagtggtgattttttgaaattatgtagttagttttaggagtaatagaaatatttttatatgaaatggtataatatgattgatttttttttaaaattgagtagttgtaagtaagaaaagtgtaatataaatattttttttttttttcgagatgtattttattcggttttttaggttggagtgtagtagtgtaattataattcgttgtagttttgtttttttggatttaagtgatttttttatttgagttttttgagtagttgggattataggtatgaggtagatattgtgtttgtttttaaaaatattttgaattttggtagtgatatttttttgaaggtattaaaagttagaaatttgttttattttattaaagttttaggtatttttatttagttttatacgtgtgtgttgtatttatttaatgtttgtttaaaattgtattgtttttttggttttaaaataatttaagtttaggtcgggcgtggtggtttatgtttgtaatcgtagtattttgggaggtcgaggcgggtggattatttgagttttggtggttaaggatgtaggtcggttgggtaaggtagtttttgtttgtaattttagtattttgggaggttaaggcgggtggattatttgaggttaggagttcgattttagtttggttaatagggtgaaatttgtttttaataaaaatataaaaaaaattagtcgggtgtggtgatatgtgtttgtaattttagttatttgggaggtggaagtataagaatcgtttgaattcgggaggttgtagtgagttgagattgggttattgtataaataaataaataaaaagcggtgatttgtgattgtattattgtattttagtttgggtgatagagtaagattttattttaaaaaaaaaagaaaaaaaaattaagtttaagatgtttaatttaaaaataagtttttaaaaaagtatgtttttgaggtaaaatggtgagaataggataagtatttgaaaatattgtggtatttgattagaattatttttggttatattgttttgtggttaaagtggttatgattaaatgattatatgttattttaaaaatattgtttttaaggtattattgatgtatatgaatggattgatattattatggagtggtttgttataaaagcgagtttggtttttttgtgttttgtcgttgtgtgatgttttttattgcgatgtgattttttaattttagattttttagtttttagaattgggagttgataaatttttgttatttgtaaattattgagttttatatattttggtatagtagtataaaatagattaagataggtagttgggtaatagtaagtttgagtttttttttagtagtaattggtaggagtgaaattttggttgttttttttgtagttaaatgttttattattgagttatatttattggttattttttttggatagttgttgttttttattataagtttgtttaattgttttatttatttaatttatttgttgtggattttgaatttatgatttttgtttaaagtaatttaagttttgaataattttgaaatgtatttagttgttaaattaatatttagaaaaaaatggatagattagaataaatttgttatatttattggagaaattattgtattaattagggttttttggtgatttttaagttttatatttgtagaaaaggttattattatttttgagtagtaagatattgtatattttttataaattagagttttttgttttgttgattttatataaatacgttggttttataagtatggtttttttttgttaattattttttttgattttttaatttatttttaatattattttgggtaatagttttattaaaagtgttttgtattttttaaattatttttatatagattatatgggatttttataataattatatgtgttaaggtaagataggtattttaaaaaaagaaaaatagggttgagtatttgtaattttagtattttgggaggtagaggtgggtagattatttgagttcgtaagtttaggacgagtttgggtaatatggcgaaattttgtttttataaaaaatataaaaattatttaggcgtggtgatatgtaattgtagatttatatagtgtgatatgtaattgtaggttgaagtgggaggatcgtttgagtttgggaggttgagggtgtagtgagttatgattatattattgtattttagtttgggtgatagagcgaaattttgtgtttaaaaattaaataaataaataaaaattagaaaagaaaaatagaatggagattttttaaaaaaattattttggtttataattaaggaatttttaagagattgtttaaaggaggatagttattgatgaattttttgggttgattgtgtgtgtatagtttttaaatgtgttttaattgttatgagatgataatttttttaataattaaaagagtcgggtatttttggttatttaaatttaattgattttagtagaaaatatttgttttaaataataatttttttttgaaatgtttagagagaaggaaattgagtttaatggtagggttgttggttgttatttagggaaattaatttttgtttggtgttttttttgttgtattagtagttcgatgtttaaggggggttgaagttttttatggaagtattgttaagtaagtttttcgtaggttttcggttgtatttttttattgtgtaaataggggtattaggagaaatgtaatttttgaatattgtttaattagtttttgtttggtaatgtgttttgaaatttttaatgaatgttagtaaataaattagatttatagtgtatttgatacgtatgttttttttttaaataaaatttaaattttataaatataaattgagttattttttaaatgtttgtatatgaatggaagtttttgttttgtttttttgtaattaatattataaaatttttgaaggtttttgatgtatttattgtataatgttaatttaaaataaaattttattttgattaaatttgtaggtatagagagatattaaatttatttttgttgattagtataatatgtttgtattaattagatttaaaaaatgtgtaaaggagtgttatgttgtaaagattttattatagttgtaaatattagtgtagttgttataaatttagtaaaattttaggttaaataattttaaatttattgaagatgatattttagatttagtttttataatataaatattttaggaaatgtttttgagatgagtgggattgttattaatattaatgttattaaatttaaggttgagaagttatttttttttaagttttatttttatttttaattttggaataaaatatatttttaatttgaagtatggcgtgtttttttatagtttgaaaatatttgattttgttgtttttgaattgtaggaatgtaaaaatatagtataagttttttatttttgatggttatttaatttaaatgagtttgttagaattaaagttgggaagaattaattgttaatggaatttagttgtattgtttaattaaaaaataaaaggatgttaaaaatagttgttgtttaaggattgtattagtgtgatattttagaatgttgtatttagggaaggaattttattttaaagtgatttgaagtatatttttttgtggttttgttttttatttagataaggtaggataagtatttaaaatttgtattagttttaatttgtttttttttttttagtttttatttagtgggatatttggtgaggtattattttggttatatagttatttttaaagtttttttttgtgttttgatttttaattaagttttttatgatgtttgttaaatttaagagtatgtaggggtttattggaagtgttgaataattgggttttggtttaattttttgtgtatggttgtatgtgtggggtgattttgttttttttgtttgtttattggtaattgtattaaattttatttgtttttattgaatttttttttgttggatttttggggaaatttttaaattggataatagagtaattaagtgattgtttgtaagcgatttttagtgttttattagagaggtagtatttattaaaagaaaatagttgaattttttttgtttaaatttgtttttgaaattttgttaattttttaataaggagaattgaagttaagtattgttaagtattatattgtaatttgaagttggtaattgtggaagtatatagttgatatggtgatattttttttagaggaattttggttatttttattagtataaaggatataatagattgtatttattgtttttatttttgttttattttttttgtttttttttttttttttttttttttttttttttgagatagagttttgttttgttgtttaggttgtagtatagtggtacgattttggtttattgtaattttcgttttttaggtttaagggatttttgtgttttagtttttaaagtagttgggattataggcgttcgttattacgtttatttattttttttttttcgtttttagtagagatagggtttttttatgttgtttaagttggttttgaatttttgggtttaaatgatttttttttttagttttttaaagtgttgggattataggtgtgagttaatatttttggtttttttttttttaaaaaaaattaaagaggttgtggaggtttttttgaatttttttggtgtttttaaaaatgttatattttgagaagaaaatttgggtaggtataaagaattttttttttttttgtttgaaaatttttttgtagtcgttttggaatttttttttattgttatttatttttttttttttttttgatattgggttttttgtttattttattttttttttttgttttttttttttttttgatgtgaagtagatgttttagtatttttttaaagtagaatgtgtgggagatgaattatttttagttattgtttgttgaatgtgaagttattttagttatatttgattgatagtttgtttagataagaattttaggttggaaattatttttttttagaattgtgaggtattgtttaatttttttttatttttttgtgtttttataattttatgatgatgtgtttggtgtggatttttttttatttatttttttgggtatttggttagtttttttaatttggaaatttttgttttttcgttttgagaatatttttggtgattatttttttttttttatattggaatttattataagaaagttaattaaggaagagtagagggttgtgttatgggttgaattgtgtttattttttttttatttataagttgaagttgaagttgtaatttttaatgggattgtatttggagatggagtttttaggaagttatatcggtggggttttaatttggtaggattggtggttttagaagaagaggtagagagagagatttttttttatatgagtataaagaagaggttatgtgaggatataggtggttgtttatatataagttaggaagagggtttttaataggatttaataggttttgattgtggattttatagtttttagaattgtgagaaaatatatttttgttatttaagttattatgtatgtgatattttgttatggtagtttaaattgacgaagataggttgaggttaagttaggattttagttttataaaggtgaattgtatgcgttgtaagagaatattaatatgatgttggtgcgcgtgtgtttttttttttgattggtttttttttgaatttagtttatttatttgtatattattttttgtgagttagtataagttattaatttaaggttttagatttgtgttgattaatgttatagttaataggtacgtttaattatataaatttatattaattaaaattaaataaaatttaaaatttatttttttagatttattagttatattgtatgcgtttagaagttatatgtagttggcgtttgtagtattggatggatagatagagttagaatttttttatttttgtagaaagtttggttgtataatcgtattttagatatttgttttatatttttttttttttttttttttttttgtttagtgggtttgaatttttttaggtttaagatatatttaggaatattagaatttgtagtggatatttttaaggttttaaaataatattaagaagtaaatagttattatagtgtaaattttgttaaagtgttatatgtatattgagtttataattgcgtttgtagtgattatgttatttatttggttatgtttttgtagtatggtttttagaagagttgttttttatttttattgggttttttgatatgtttgtaggatagagaattgtaggaagtaggtttttatatttgagtcgtgttgttttggtttgttgtgttgaatgttgttgtgttttttcggaagaggtaggtataagtgttttagaaggaattgttagaattttattgttttattgagtattggtgagtttgaggatttataggttaaaggtaggttattgaaagcggtttatattttggaatttttcggaatagattattttttgagatgataaaaagtataattttggttagaaggattattgaattttttggaatttattttattaggttgtgtttttataggtgggaattgtttttaagaatttttaaaatagttttttgaggtaggttttgttttatttttaaagagaagcgaggttggtatttagaaattttatattatttgttttggtttattgaatgaattagtgaatagtgacgtcgggtttagattttttcgtttttttttaaaatttgtgtttttttttattagaatgtaattagggttggttagtgattttttttgtttattacgtgggagtagtttttttaaagttgggttttgtattaaagggattgtttataaatttattaaattaaatatgtttaatttagggtaaaaattgaatgatttagaagatttttttttttttgtttttttttttgttttttttttttttttgagatggagttttattttgttttttaggttggagtgtagtggcgttatttttgtttattgtaaatttcgtttttcgggtttttgttatttttttgttttagtttttcgagtagttgggagtataggcgttcgttatcgcgtttggttaatttttttttttttttttttagtggagatggggttttatcgtgttagttaggatggtttggattttttgatttcgtgatttatttgtttcggttttttaaaatgttgggattataggcgtgagttatcgcgttaggtttttttttttttattttaaagaattgttgttatttttattttaattaaattgaaaaatatagggaaaaaatgtaataataataaattttaggtagggtatggtaatttacgtttgtaattttagtattttggattatttgagtttaggagtttgagattagtttgggtaatatagtgagattttagttttagaaaaaaagaattagttgggtatggtggtgtatgtttgtggttttagttattagggaggttgaggtgggaggatcgtttggaggaggttgaggttgtagtgagtttaaattagttatgttattgtattttagtttgggcgatagaataagattttgtttaaaaaaaatttagaattaaaaaaaataaaaaattttaataaattttttatagtattagtatttatttttgaagattttttgtatttatatatataaatattttgtataaaaatgttatgatattataaatatttttttgtagtttttttatttgatttaagaatttatgatgaatatttttttgagttagttaggaatattttttatgtattgttaatttttttgttattttaataattttgtgtgtgtgtgtgtgtgtgtgtgtgtgtgttttgatggttattgttatattgattttagttattttttattattttagtttttaggtttttttttttttttgtgtggttttaatcgagaaataattgtaagcgaggaataaagttttaaatttggtggtatttattattaaataattgtagatgtttgttttttttttatatagaaagagtttatttttatgttgtatttgttttttttatttttttttgttttattttttttttatttcgtttaattttaattttaatattagatttattttgtgtagtttttggtttgttgcggagttatttttgttattggttttttttttagtttttagtcgttgatgtgttttttggtagttagtgtaaatgatggtggtttttttattttgacgtgggagtattttaagttagtagtaatatttggtgtaataagtattagggtgggataattatatatttttggattgggattttaaaattgttagttgttttgttatttgtggtttagggattaatttgagtaagagaaatttcgtttttattaaaaatataaaaaaaaattagttaggcgtggtggtagttgtttgtaattttagttatttaggaggttgaggtaagagaattgtttgaatttaggagtcggaggttgtattgagtcgagatcgtgttattgtattttagtttgggcgatagagcgagattgtttgaaaaaaaaaaaaaagaaattgtatttattttttatagattttttttttttggttattatttgatattgttttattaggtattttattatgtattttatttttttttattatttttggtttaaattttttttttagttttttatttggattatttttttttatttttttttttatattttggattttttagattttttttttttttttaattttattattattagattttttttttgtttaaattttatgatttagttttttagtggatggagatagaaggttgaggtgaggaaggtgggggtaaatacgatatttgttgaattttaaatataaaataagatattaaggaatttatttttttttttattttttatatttgggagattatagaattggttggtcgttaatattaagtggtttttgtgtgtagatttttataaagaaatgattgataaagtttttatttttgggagttttgatagtaaaaagtgtgatatttatgatatatatattgttagttaatgatggatagaaatggatagattttgaggagatgagttttgagtatatagagatattattttgtgtgtgtgtgtgtgcgtatgtatttgagatagggttttattttgtttttttgtttggagtgtagtgatgcggatatggtttattatggtttcgattttttaggtttaaataatttttttattttagtttttcgtgtagttggaattataggtatgcgttattatgtttggttaattttttgatgttttgtagagttgaggttttattatattgtttaggttggtttcgaatttttggatttaagcgattttttttttttagttttttaaagtgttggaattataggtgtgagttattgtagggtcgtagagatatagtatatttgtgatattattagtaatttttatttgatagagggttaagtattgattaagggataaaatttattttggggtttagaaaataaggttttgttttaagaaggcggttagatgtggataacggttttagtattgaatttggaatttttttattaaaatgtagtttatatgtgggtatttagtaatagagttattgttagtaaagaattatatatgtgatatatagaggaattatatatagttttttaaaataatatgttttttatttttgaggaaattttagataaagttggaaaaattttaagtttttttattgtttattataaattatagggattttgatattgtgtagttaaaagtttagtagatttttaaaattagttattaattgatttcggttttgtatatttttgttgttttgtaagagtatttttaaggtttaaataaagttaaaagtaaggtaaatggtgtgttagattaaaattgtattttttgtttgttaatatttaaatagaaaaataaattagtttaagaatatgattgtaatttaggattttaaaattatatatatcgtagtatttttaaagtttgtaattaaaaagtagaattattgtgttttatagtattttgaaattttgtttgatgttattgtatgtttgtgttgttttgatatggtttttggattgcgtttgtggtataagattgattttttgtatttgtatattatttggttgtatagatggtattcgttttaaatttattaaataaaattagaataatgattttgttagttggttttgattgtttttatttattttggatggttgtagtttttgtgaagatggtagattaaatttggaagtgatagttaagaatagaatgggtgggttataggtttgttaattgattttagtagaatttatgttatttttttttgggtataagacgttttttttaattgaatgtttataggttagttgagttattttttgtttttatatttttattgtttttggtttagatttttttttattttttttgggttattttatttatttttatagttttagttattgtttttttgttgatgtttttatatttatgtttttagtttaggtttgttttttaattttttttttatatatttattgtttattggatttttttatttagatgttttaggttttttgtatttattatgttttaagttgagtttatttttttatttaagtatgtttttatttttttgttgttttttttagtgtatggtggtataatatatttagttttttaattagaaatttaagtaatatttttattttttttttattttttttttttattatgtttgatttaaatattaaatattatgtgttttttttgataagtattttttatttgggtgtttttttttatttttttatgtgattagattaggttttagttattgtaagatggttttttattttatagtatgattttgttttttttggtggtttattttttatattgtttgtgtgatttttttgaaatagaaatttgagtatattattttaatgttaaaaattttttagtgatttatttttgtttttagaataaagtttagagtttttattttgttttgtaaagtttttttaaatttatttattatttgtttgagtagggtgatagttttggtaaaatgtatttttatagttagaagttttttttatatttaatatattatgatgttttttttttttgtgagaagcgagaaattttattgtgatattttgtttattagtaaattatatttagatttgtgtgttttttttttaaaaaatatattatatatatttttataaagagagaaaatatgtaatagttgttaggtttttttgagaaatttttttgtagaagttatgtttggtgttgttttaatgtttttattataaagtagagagtttgtttgatgaattttatataaataaagtaatggaggtaattagataatattatagttttttttttttttttagaagaggtaataagagttagtatttatttggaagtagttgtttagatatgttaatagaagttgtgggtatttgtatttttttttaagaaagcgggttttttgaaaattttgggaaaggaaggaagagagggacggagagagggagggaagatgttatgtaggtgggttagttattagtagagggataaaaaatggtgagattaaaatataaaagtacgagtagtgtatttttttggttggtttttatttttagatgttttaaaatgtttatttttattattataagttagtgtagatgtttagagaaaggaggtatttttgatttgggtaggattttaaataattgttttttgtattgttagtttatattttgttgaaagttttttttgttttagtttgttgtttttttggtgagtttttatatatggtttagtttttagtgttaggtttttttttttggaaattttttttaatattttaaatttgggttaagtgttttatttagtttgttgtattatgtaatattttttattttgtagttttagtttgtattttaagtttagtgattatgattaatgttattgtttgaaatgaaagagattttaagagtttttttaagaggattgattagagttttgagatatttttttatttttaaatatataaaagttatgagttgtttttgaattttattataattttgaaaatttttagatatattaaaggtattttgtagatgagagttagttcgttttaatttagttgtgattattttgagtgtgaatgttagtgtttatgtttgatgttttttattttggtgtatattttaggtgtaaagttagtttaatattgttttaatatatgattgtgtttgtttggttaattgaatatattttatttgttttttttttattttttgtttttatatcgaaatttatatatttgaaatattttaatttattagatatatgtaatttttttatttatgttttattgaaattttgttggaaaatttaaattaattatttttagattaaaaaaaaaagtttaataaagttttgtggatttggtatgggaatatattaataaattttttaaaataaaaattatataattatttttaaagataatatttatttttagatttgttgagtttttttatttatttttttaaagttttttttgttatttaaagatatgatatttgaggatttgtttttttattatttttttattttttaggtaatgaaattttttgttatatttaattagtgtgtttaggttatgatttttagttattttaaattggagtgtgatagagaggttttaatatattgtgtagtagatttttgatatttttagatgtaaaaggtttgttttgatttttaaaattattttattgagatatgattgatatataaaaagttgtatatatttaatttatagaatttaatgagtttgtggataagtatatatttatgaagttattattattattaaaattgtaaatatatttattattttttaaagttttttttgtttgttttgttattatttttttgtgtatggtaagaatatttaatataagttttatttttttagtatatttttattatatagtataatattgttagttatgggtattatgtaatatagtagatttttaaaatttattttttttttaggattgaaattttgtatttttaattattattttttaatttttttttttgttagtttttggtaatagttattgtattttttttttttttttttttaattgatatagggttttattgtgttgtttaggttggaatgagtggcgtgattatagtttattgtagttttaattttcggggtttaagagatttttttgttgtagttttttaagtagttaggattataggtatgcgttattttgtttggttaattttttattttgtatagatggggttttgttttgttgtttaggttggttttaaattttggttttagatgatttttttttattgtggttttgatgtgtatttttttgatgattattgatgttgagtattgttttaaataattgttagttatttgtttgttttttttgaagaaaagttggtttaggtttttttgattatttaaaagattaggtttttttgttttgttttgttttgttttgttttgttttgttttgttttgttttttgttttgttttggtattgagttgtttgagttttttatataatatattttggatattaatatttttttagatgtatagtttgtaaatatttttttttattttgtaggttgtttttttacgttgttattttttttgttgtgaagatatttttagtttgatggatttttagtttgatgtaattttatttgtttgtttttgtttttattgtttttgtggttttatttaaaaaatttttgtttagaagattagtattatgaagtattttttttatgtttttttttagtagttttataattttaggtattatatttagtttattttgtgttgatttttttttttttttagattaatattttaaattttataatatatttatatttatatataaatttttgtttataagtataaaaggtaaagaattgtaaagaagttaagtaattgtattattagttatatttaatcgaattaatattgttgtttttcgttcgtagttttaatttagaggaaatggtagatgtcgttttatatatggattttattgttagttttagaagttggagattgtgtgtggtttcgtagaagtttgggtttttatagagttgaattgagattttattatgttttaggttatattagttagaagaaagtcgtttattgttgtttgagtttcgttgttggtgaagaataagttttttagggttttaaatttagaatttatggtttgtgtttttatattgtttaattgaattttgttttttagagtaggtatatttttaatagtggagatttttttagtttgtgtttttgtgttagatgaattagtatttatggaaaagttggagtgttttagaatattttttagaggtagatgagggttattgtttaagaaaaagtttaagtttgtttgtgtttgtttgttaaatattttaaggtttaagaagttagaattttttttatatttataggattgagtagaggtatttgcgagtaagaagttcgtttgagtttttgtgtttagtgattttaagattggtttagtgtttatggtgttaagtttattttttttagtttgagtttggatatgtgaggtcgaaaagaattttttaatattaaaattgattttagggttttgggttgggttagatgggagttgggtgttaggtttaggatttgtgttagataaaagattatgatgatttaatgtttgagtaggtagattatttgataagatgttttttaaattatttaataaatttatggtttgggtttgattatttgttatgttttgtgaaggaagtatattgttttgtgtattgaagtttataattggtgtatattttttaattttttgatttaaagttttaggtttattttgaggtaataaattatgagttattatttttgttattaaattgttgtttataatgttatttgtagtaatattatatgatgaatgaatatttaaaaatgtttttgtatattttagtttggtttatttgtatatggttattcgttggattttgtattttattggtttgagttttttaggagattttattcgattggaaataggtgtttataaatgtattagtttgagtagttatagatgaagttattttagagttgggtaaaaatgtttgagtgtgaatattaatgggaagagatatttgagaattaaataataaattagtttgagaataagacgatatagaggaattagcggtggtttattgtgtagaaggtataaagttttgtgaggtataagatagatttgtttgtacgttgattgaagaaatgtcgtttttttgatatgtgttttttagtttttgtaaagtattagatggatttttatttaagtttatttgaatattagtatttattggtttaatagtaataggattagtaatttagaaaagaagtaggttttttttaagagagtaagtttttgaatttaggtcgaggattagggtttttattgataagggtaggtagtaagtgtatagtttttgtggtagagttttgattaatatttaatattataggttgggttgaggagtcggttgtaggtataaagataggtatgagagaaaattgtattacgggtagtttaagtaaagttattttgggttttggtaaaagtaatttttgaggttatttcggtgatgttgtaagaaagagtttgtttgttagtgttagagttataagagtttttaaaagatggttttagttttatttttgaagtttttagtttttgggtgtttggtttagggattggttggttgttaaatgatttagtggttttgttggataatttttggttttgtatagttttttatttttttttttttattaggtgggtttttgtgttttgtagggatttcgtggttagttcggtagatgtgagattgtaatgtttttttattggcgtagggatagtcgtatgtgtatcggaaggttttgttatagttttttgtaagtttttttaggttttattttgtatcgtacgaattgttgtatttgttatatttgtgtttttttttagtatggatttttataaagtgttgttttacgagagaaaattgagaaaatggtttgttagggtttttggggtagttttcgattggataatagtagaatttcggtatagtttttaaatttttttttattattggattgattgtgttatattgtatgcggtggtttttgattaggtgtatgttgagcgcggggttgttgggtaggattttgcggtagtcgcgtacggtgtataggatgttgggttatgtggtttgggatagttcgtttatttattgttggattagttttttcgttagtacggaggtcgcgggttgttgcgttattttcgcgggtcgcggtcggttgttttttagtcggggtttcgggggtatttacgggttcgaggcggcggcggaggtttttttcgtggtcgtcgggacggcgcgggtattcgtcgttagagtcgtggatttcgtcgtcgttatcgttttcgaggtcgttatggttttcgtagggcggttaggtttagttcgtagttgtgttgatttttttaagtggtgagagatagggtttattttcgtttttttgtatgtggatatttagtttttttgaatattatttattgaagagattgttttttttttagtgtgtgtttttggcgtttttgttaaaaattagttgattgtaagtgtgtttttttttttgttttatttgtttgtgtgtttttatgttagtattttattgttttgtttattatagttttgtagtatattttgaagttaggtaagattgatgtttttagttttgtttttttgacgtaagattgttttggttttttggggttttaatatatatatatatatatatatatatttttttttttttttttttttgagatagagttttatttttttatttaggttggagtggagtggcgcgattttggtttattgtattttttattttttgggtttaagagatttttttgttttagtttttcgagtaatcgggattataggtgtttgttattatttttagttaatttttgtatttttagtagagatggggtttcgttatgttggttagggtggtttcgtatttttgattttaggtgatttatttgtttcggttttttaaagtgttgggattataggtatgagttattgtgtttagtttttatataaattttaacggatttttaaaagatacgaatttttttaatttgtgaatatggggtatttttttattttttgtgtgtttttaattttttttaatattttatagtttttattgtagagattttttatatttttggttaaatttatatttaagtattttatttttttttttttggtaggtattgtaaatgggattgtttttttgatttattttttagatagtttgttattaatatttggtgtatagaaatattaatgatttttgtttgttgattttatattttgtaatttgattgaatttatttattagttttaatagtttttttttagtggaatttgtagggttttttatgtattgtgttatttgtaaatatagatagtttaatttttttttttttagtttggatgtttttttttttttttttttatttaattgttttgggtaggatttttagtgttgtgttggatagaagtggtaagagtggatttcgttgtattgtttttgattttagagaaaatgtttttaatttttttttagtcggtatggttagttgtgggtttgttatagatggttttgtgttgatgtatattttttttatatttaatttgttgatagttttttttattatgaaagatgtcgaattttgttaaatgttttttttgtatttattgagatgattatatgatttttatttttggttttgttaatgtggtatattatttttatagattggcgtatgttgaattatttttataatttaggggtaaattttatttgattatgatatgtgatttttttttatgtgttgttgaattttgtttgttagtgttgtgttgagtgaggatttttgtatttaagtttattagggatattggtttatgattttttttttgtgtttttgttttttatttttagtagtgtttttttgaaagtaatttgtttttttataatttttgtttgtttttaggattttttttttgtttttagtttttgtagttttattgtgtattttattttagaggagtgtgttttgttttattttttagaggttttgttggattgagttttggttatttatttattttggtagttggtttaataattttttttttattggttgtgattttttgtgttatttttttatttttttaatggtgttttttttattgtttaaataaattattttatttaaattttttttttaagattttttttttgggagtaatagggttttttcgatttgaggattaatgttcgtgttgattataatggaatagtgatattgttgatagaaagatattattggttatatttggaagatttttagtttttttaatggtaaaagatttgggaatttgtggattaagatggagtatatatgattttagatagaagtattgttttttaggttttttagagttttttaaaggatggatttgtatggtaagagaagtttttttattatttttaatggggttttatatggttttggttaattatttttttattgtttgaatattatttttttggaatttagtgatatgtgtgtttatttaggaggtagaattaattgatttataataattgttaaacgttttttagagtttattgtaaggttggatgatatgaagattaattttttggaattagttttttagaagatgtaagttttaggtatgtttgatttttattttaaaacgtgtggttgggtataatggattatgtttgtaattttagtattttgggaggttgaggtaggaggattatttgagtttaggagtttgagattagtttgggtaatatagtaagattttgtttttataaaaaataaaaataatattagattagttaggtatggtggtatgtgtttatagttttagttatttgggaggttgaggtaggaggattttttgagttttggaggttaaggttgtagtgagttatgatagtattattgtattttagtttgggtgatagagtaagattttgttttagttagttaataaaatattatatagttatggttaaaaattaaaataaatttttaaaaatttgaatgaataatagagaatgtattaatatgttttgaatttatattaattttgtggagaagaattatttagaattttagtttaattataagtttgtagatgatgatatatgaaattattattttttcgtgaaatataagtgtgaaagatgattatttttttgtggtatgatttttatatattatatttacgcgtattttaaggtttagttgtgtggttttttagtttttattttagttattggttgtgtaaatatttcgtgattgtgtaaaaattatatttgttaatttatatatattgttattggtaggagatagatagatagtgttatttattagaattatatgtgtttttgagtattagttatttaattaggtattttaaaagtttagaaaaaaatttttaagtttgaattttatgtagtaattttgaaaaattatagaaaatagagtaataaaatataaaagtagtagattgaaatgatattttttttattattattatttttagagatagggttttgtttttttgtttaggttggagtgtagtggtatgattcgtagtttattgtagttttaaatttatgggtttaagtagttttttttttttagttttttaagtagttaggattattggtgtgtgttattatatttggttaatttttgtttgtttgtttttttgtgaagatggggttttattgttaattgagttggttttagaatttttgggttaaagtgatttttttattttagtttttttaagtattagggttatacgtttgtattattaagtttggtttgaaatgagatttttaaaggaaataggaaatagtgaataaagagaagagttattggaaattaaaaaaaaaaaaaagtgaaatgttttatgtgtgattaaatagaagtattggatttagattattaataaattaattaagatggaagagtataggaaattttttttggtaagagtttggtaattaagacgttaggggttagagtgaaatatgttgaatgtatgagttaagtgttgggatttagttgatttataagaataaataaaaagaaatttatgtaaatttatataaaatataaaattatggatatttgtattaaagtatggtttgttaatagaatttgtattagtgtatgttaaggttaagttatagttaaagtttatttaaagaatagtttagcggtttttaagtagttgggtaggtaaagaaaattttttgatatatataatttttaagatttgttgtaataaatagttattatattagttaaattaagtttaatttttttttatatatggttttggtaaaggtattatgttatatagaataaatatgatcgatttggataatgaaattgtaaataaaattttgttttataaattattattgttgaaatagtttgtgttttagagaaagtaagaatgtttttagataaaagaaataattattttatttattaatattaaaattaaattatagtattttattttaatgttagaagtatttgttttgtatagagattatgaagaattgggattatgaatttgttgttgataaataaaattttagaggttttgggataaattatgaatttagtttgggagaataggggttttttattagttagaaaaattgattttattattatatggtagtggtaaaaaaaagtttatattaaattttttattttggatatgtattttgaatttttatgtaatagaatagaaatatagttttgtttaggaaaaaaaattgtagaaatattattttgtgtagtttttgtttagaatatgtttgtttttttgttgtatataagaaagagaattttttagtttaattttttgaagagtaatttgaatggtttttatttgggaaattatgtaattttatattaaatagtaggtggtaaggtagttagatggaaatgtttagtttatttagtattattagattgatttgataaatggaatttttttaattttatggaaagtatttttttttttttattttttggtagaggtagatattgtttgtggtttttttataaaagtttgagtgggtaaattttggatgtgtaaatataaatagtagatagagatattgtttttgatagttggaaggatttattgaggattttagaaggagattgttgatatggatgatgttggatagagagatttgagggaggaattaattaatgtgaatataaatgaggaatgtatatgtttagaaaaaatgatagtttttttttaagtttaggttgaggttgttgaaaatttttgtttttgatatggataaaaataataaaaaattgatttttatggataaaaataataaaaaataataaaaaattgatatattatgtggatgagtatatggtatgttttttggtgagtggttttatttcgtatatgatatgtaattttgggtaagatatttgggtaagatatttattttttttttttttagtttttatatttgtatagtgggattgtagggattgagataagtttacggtgtttataattgtttttggtatagaataagtattatgtaagtgatagttgttataaaataataataattattattttggtggattgagaaatttttttaaggaggaagttatttgttttttttaataattttagtatagttgatgtatttatatataaatgagatatagaatttaggagtaaattatttagtgtttaagatgatttataaagatatgtttatattattttttaaaaattaaattgtgaagaatattgtaggtgttcgttattatgttttattaaattttgagtttttgtacgtgttaggaaagtgttgtggttggatattgggtttgatgatgttttttttttttttgtttgaatagtaattagttttcgagatttttttggtttgtgaaatttttgtgtttttacgttatgtgtgtgtgttgttattagattaattttatattattattggaatttttgtttgtatatttgttattttatttagttgtgtgttttttagtttattataaaatgttttaaagattaaaaattatatttttttattagttatagtgtttgttgtatagtaggtgtttttaggtaaatgattgaatgataaataaattatatcggttatgatagtatttaaaagaaaatagttttttttttgttttttttgtaaggagtaaggaaattttttttggaagtttttatattagatatttttacgtattggtttaggatatagttattgataagggaatggaatttttttagttggtttggaaaaggtagtttgtgtttaattataaagattattgtattggttataaaaataatatatgattattataggaaatttataaattaatgaaaagtataataaaataatttggtattatataaagaaaattgttgttaatattgtggtgtttgttttttagtttttggttgtatatgtatatgtttgtgtgtatagaagaaaattgtaattatattgtatatagttttttatagttttatatttaagtttaatataagtagtttttcgtattattaagttatatttttttgaaattagattaatggtttaagtttttttatatggttgtattataaattatataatttattgtttattgttggagatatagattgttagtagttttttattattgtaaataaatatgtagtgaatatttttttatattaattatgtatatttttggttatttttttatattaaatttttagaagtggattaatgagtgaaagggtataaatatatttaaagttttttgatatatttttttgattattttttagaaaatttggattaattatattattagaaatttgtatatgagtggttgtttaattgtatttttgttagtattgggaattttttttttttaagataggattttgttttgttgtttaggttggagtgtagtggtataattatagtttattgtagttttagttttttgggtttaagtaatttgtgaagtattttttaattattgattttatagttaaaagtggttttattttgtttttttgatttgtagtgttattttttatttagttagtatttagtagatgtttgttgaaagaagaaattcgtgttttttgatatgtatattgtttatttatatttattattggtattattatttttgtttttttattgtgatatataaaaagtatataagttgtattaatgttaagtgtaaaattttatataatttatggtattttatttttagtttgttgttttggatattagtttgtttagtttatagtattataataatttataatattattttagttaagtttgttgggtgagatttattttattatagttatattttttttagggtttttaattatatagagattttatttttggttttgattgagaaataaattattttttttttaatttttttatattatttattatatgtttatggtttttttgtataatttttttttttggtaatatatcgttttatttatttttatgtttttttagatattaaaattttttttttttagtatttagaagaattattaaattattttttttttatgtttttttttttattttttggtttagatttattttttttgtgtgtgtgcgtgtttttttttgtgcgtgtgcgtatgcgtatgtttgtgtgtgtgtgtgtgtgtgtgtgtgtatgtgtgtgtgtgtgtgagagagaggagttttagagtttaagtaaatgatatttttttgtgttatttattaatagttataattgttgttgttaatatttattttatttaatttttttttgtttggtaagattggtatatattattgtgttttttatttagagggaagtgaaatattttgggttatattgttaatagtgttgtgtggattagagttgagattagaatttagtatgttagtgatatgtttggattttaagttataaattgtattgggtttagttttgtatataaaaagaggttgaattgaagtttttaagatgttgagaaatttatagtttatttaaatttgagttttgtttttaagtatattttttttttagttatttgtagttagaaaagtaaaagtttttaagtataatttaatatgattaataggaattatatgatttttatagttattttgttgcgtattagtgtttatataatttatgatttgatagtcgattaaattgttttatttattttatattaatatattgtgaatgtagtaggaattggtttagtaaaattttgaaatttttgattttaatatttgtgggatagtaaagtaaataattttggggtttttaggttgtgtgatgtatagttcgtttaggatattaatgtttattttttttgttgattttattgtttttgtgaatagttttgtcgataggtgtttaggtttgttaagagagattatttttagttagtagaggatttttggagaaagatattggtttttatttagaaatataataattaatgataataattgatattgaatgggtgttaaaatgtgttaggtataattttaagtgttttttgtgtaattaatgtattttattatttatagtaattttattaggttttttttattttatagatatagaaacggaggtatagattggtaaaataattttttaaggttatatagttagtatgttatagagtagggatttaaatttcggtagtttgtttttaagttagtttttttaattattttgttatgttgatatttattagatgaaaagaaagaggtataggtgagttataagtggttgtttgtgtttttggaaaatatttgattttatgtttattggtagtttgaaataattaagttgttattatttattaaatttttatttttttgtaaagtgagttatttgtttgtatgtaatattataattggaatatagtgagtaaagtatatttttttatgtttgtataaatttagggtaagtttgtatttttattaaaaaagtggtttttgagaaagaaagtgtttgaaataaaattttgaagagtgggtttagaattagggtgatagttatagagtagtaagttatttggttaatgttttgtaataaatagtagagattgttttattggttttgtgcgttattttgaagagttgaatgttgtagaaatggtaggttaaatgttttggagtaatttaagttgattttaggtagaatttgtttttggtatttttttattttgtttgttattggtatttgttttatttattttttgttattgttagatatggtatggtgtttaataatttttattaattattaataagtttagttgggtgtggtgatatgtatttgtagttttagtttttggggaggttgaggaggaggattttttgagtttacgagtttgaggttgtagtgagttatgattgtgttattgtatattagtttgggtaatagaggaagagttatttgtttaaaataaaataataataaaataagttttttataaaatattaattaatgtttaataaaagggatatttttttttagggtatttgtatttaatagattatttttaaagtttgggttttgggttatttttgagagttggtatttattgttataaattttttttttagaattgtttttgttttattttataggatttggtatgttatgttttcgtttttatttgttttaggatatttttaaatttttttttaaatttatttattaatttattgtttaggagtatgttgtttaatttttatgtatttgtaaagtttttaaggtttttttttttattgatgtttagttttatattattgtggttagaaaagatatttgataagattttgatatttttaaatttaaaagatttattttgtggtttaatatatgatttatattggaaaatgattgatgtgtagttgagaagaatgtgtattttgtatttgttggatagaatgttttgtaaatgtttgttaggtttatttggtttagggtatagtttatatttgatgtttttttgttgattttttgtttaaatgatttgtttattgttgaaaatagggtgttaaatttttttattagtattgtgttataatttatttgttttttgagatttattaatattggttttatgtatttaggtgttttgatattgggtgtatatatatttatttaatattagagtatttaaatatgtaatatatttttttgttgaattgattaattttattattatatattaatataatgattttttttgtttttatttatagatgatttaaagtttattttatttgatataagtatagttatttttgttttggtttttatttgtgtgaagtatttttttttatttatttatttttagtttatgtgtatttttataggtgaggtaagttttttgtaggtagtatatagttgggttttgttttttttttttttaaatttatttagttattttgtgttttttaattggataatttaatttatttatatttaaagtaattattggtaggtaaggatttattattgttattttattaatttttttttagttttgtagattttttttttttttttttttttttttgaggttaagtgattttttttagtagtatattttgattttttgttttttatttttagtgtatttattataggtttttgttttgtggttattatgggatttataaaagtatgttttatagttataaaaggttattttatattgatagtaattttgatcgaaaagaaaatattttttaattttatttttttattttgagtttttggtgttaaaatttatatttttttatattgtatgttttttaataaattatcgtagttattatttttaattgtgttgttttaatttttttaaaaaaatatatgatgtatatattattattatagtattagagattttagaatttgattgtgtatttgtttttattagtgagttatatatttttagatgtttttgtgttgtttattgttattttttttttttattttgaagaattttttttagtattttttgtaagataggtttggtgttgatgaattttattagtttttgtcgtttagaagtttttatttttttttttatttttgaagtatagttttggtaggtgtaatatttttggttgatagttttaatttttttttttttaggattttgaatttttttaggataatgtttttgtttagaggttttttgttaggtatattagtatttttttataaattatttgtttttttttttttgttgtttttaggattttttttttgtgtttgatttttgatattttgattataatatgttgtggggtagtgttatttggattaaatttgattggttgtttttgatttttttgtacgtggatagttatagttttttttaggtttgaaatattttttgttattatttttttaataagttttttattatttttttttttttaaggtttttttttgaatattagtgatttatatatttgttttttagatgttatttataaattttgtaattttatttttttttttttttttatttttagttacgtatttttaattaatttgtttttgaatttattgatatttttttaattgaataattttgttattgatgttttttgttggattttttattttgtttattgtagtttttagtttttggatttttgtttgattttaaaaaattattttaatttttttgttaaatttttttgatgaatttttgaattgtttttttttattttattgaagttagttaaatttttttaaaataagtattttgaatttttgttaggtagtttttttataattttttttttaggattagttattggtagtttatttttgttttaaagtatgtttttttttttttgggttagttggttatttagtagtgttttgtttagtttttatatttgtgaattttttttgaaattttttgtatttatttttaattgttttttttgttattagagtatatttgttatattattaatgtttttttaaatatatgaagatttattttatgatttagtatatgatttgtttagaatattttatgtgattttaagaaaaatgtatatattattgggtggagaattttatagatgtaagttagatttagttggtttatagtgttatttaagtgttttgtttttttgttgattttttttttagttgttttatttattattgaaaatgatagtttgaagtttttagcgattaatatttaattgtttgtttttttttttttgttaatttttgttttatgaattttggtttttagttgtgtatgtttataatggttatatttttttgatggattgatttttttatgattaataaaatgtttttttttatttttaatagttttttgttttaaaatttgttttttttaatattagtatagttataattaagttttttgtttttgtatgtttgtatgatatattttttttatttttttatttttaatttgtttgtattttttattttaaagtgtgttttttatagatagtatatagttagattatgtttttttaaagtttgataatttttgttttttgatgggaatttttttttttttttttttttttttgagatagagttttgatttgttatttaggttggagtgtaatggtacgatttttgtttattgtagttttcgttttttaggtttaagcgatttttttgttttatttattcgagtagttgggattataggtatttgttattatagttagttaatttttgtatttttagtaaagatagcgttttattatgttagttaggttggttttgaatttttgattttaagtgatttatttattttggttttttaaagtgttgggattataggtgtgagttatcgtgtttagtttgatgggattgtttattttatttatatttatgatattattgatatagttggttttatgtttgaatttttattttttttgtatatttcgttttttttttgtaattttgtttttttttttattacgtttttttaagtaagtattatttgttttttttttttttagatagggttttatttttttgtttaggttggagtgtagtggtatggatatggtttattgttattgttgattttttgggtttaagtgatttttttttttttgttgtttatgaaattgggattataggtatgtattattatatttggttaatttttttatttttgatttttttttttttttttttttttgagatagagtattggtttgttatttaggttggagtgtagtggtgtgagttcggtttattgtaatttttgtttttcgggtttaaattatttttatggtttagttttttgagtgattaggattgtaagtatgtattattatgtttagttaatttttgtatttttagtagagacggggggttttattatgttggttaggttagttttttaagttttggttttaagtgatttgtttgtttttattttttagagttttgggattataggtgtaagttagtatatttagttaattttttttatttttttgtagagattttttgttgtttaggttagttttaaatttttgggtttaagtgatttttttgttttggttttttaaagtgttgggattataggtatgagtagtaattgatgtttgtaagtgaatattttataatgtagtattttaatttttttaatgatgtttttattattttttttgaattttttttttttagtggttattttagagtttgtcgtagaataattatcgtgatatatagaaatgttatttttatatatatgatttttgatttatgttttatatatatgattttcgatttatgatggagttatattattataagttgaaaatattgtaagttagaaatttatttaatatatttaatgtagtgtatattattgtttagtgatatcgtgtattgtagagtgttatttgtttatttttgtgattgttgggttgattgggagttgtggtttgttgttattgtttagtattgtgagaaaagtatatttgagaagaatgtatgttttgttgttgggtggagagttttatagatgtttgttaggtttgtttggttatagtgttatttaagtgttttattttttcgattttttttttagttgttttattagtagttatggtattatatattagtagtttgggaaaagagtaaaatttaaaatttggagtatggtttttattgattgtgtattatttttatattattgtaaagttaaaaaattgtaagtttaatttttataagttatggattatttgtatagttttatttttttttttttttttttttgtgatattattgttatatatattattttttaatgttatgaatttaataatgttttaattattattttaatatgtgtagttatttttttagtttaatatagtttggttgtttaatttatttgtattgtgtttggtaaatatatttatatattttatttttttttatatgttataggtttaatagtatagtgtgtatatattattttatgtaatttatttttatgttagttatgagaataagagagaaaaaatgtgtatttataattatataattattagtgtttttttattgtgtggatttaaattattttttggtattaatttatttttttttgtaaagtgggttttttagtaataaatttagtttttgtttttttgggaaagtttttattttatttttatttttgaaaggtagttttgggggatatgggatttttggttgataatttttgagtattttgaatatgtttttttatgtttttttgggattttttgtttttgttgagaagttatttgttaattttattggggtttttttgtaagtaatgggttatttttttatttttgtttttaagattttttttttgtttttgatttttagtatttttattatagtgtttttgtttgtggattttattgtatttattttatttggggtttgttgatgtttttaagtgttaataaatttggggagtttatatgtttttttttaaaaattattttatttttaattggtacgtaatgtgtatatttatagggtgtaatgtgatgttttaatatatgtatatattatgtattgattaaattaggatgattagtatattcgttatttgaaatattgtttttttgtggtgagaatttttaaaatttttatttttagttattttgaaatatgtatatattatgtttaattttttttttatttaggaaaaaaggtgtagtttattatttagcgtttatttaattttatattaatgtgttttttgaggttgaagtaaatttgatagatttttaatgtgaaaataaaatataaaaattgtttttggagttatttttaaatagaattaatattagaattgtttgaattattagaattatttattttagaaaaattgaattgaaatggatttttggttaataattgtttaagaataatgttattattatgcgtaggaatgttgtattttttaggatttgatatttttagcgattgagaattattatattttgtaaatggaaatattagtgttaaaaatagaatgttataaatagaatgatgttttttgtttttaaatttaatgtattagagtttgcgaaaatagtagtaaaagcgagtaaagttattttagagtagacgttgtagttttatgtattgtgggcgagtattttttgggtaaacgggaaaagggttaattgtagttaatttattgtataatagaatataagaattttttttttttgtttaattgtaattttgtattggttgatgaatcgataattatgttttttaagttcgtggaaaatgttttagatttttaattatagttagtaggtaaaagtatttatattttttttttgatttttgttgttgtcgtttttgagattttatttaaattaatgtggtgaagttttttgagtattgttagattagatataatttttggggtatgataaggaatgagtagtagtattttatgaagttttaggttaggtatatatagaaataattatgttgttatttgagattgttttgtttttaaataagtggttttgaagatgtggtaggtaagggatagagaaagattaagttttttgtgattagaaaaggattatttgttatttagaggaaagggttagagaaaagttggtttattgaattaatgtaagaaattagaggtattgttaggatattttgtagattaagttagggtgaaaatatatttaagaataaatttagtaattgagaaattttatgttttgaatgtgagaggtaattttttatatgaaattgttagttgacgttgaaaatttatttattttggtggttgggttaggaggagatttaagaagagtttttgtatttagttttttggtggttggagagtttaaatattagatttggaagtagataatattttatagtataaggaataggaattttttttattgtttggaaaaattaagtatttggttgtttgattttagtgaaattgtaatttagggggaattgattaattttattagatagggtgtgagttttgtggtttttgttaggtgtaattgagatttatttttgttttttttttttgtttttgttatttatgatttttatgtttagagtgtgtagagtaggtttgtatttttttttttttttttagagattgaggttttgtgaagttgtttaggttggatttgaatttttgggtttaggttatttttttgttttagttttttgagtagttgggattataggtatgtattatttagttaggtttgggttttgtttggttatatttttttttatttttgttattaaggtttgtagttgtcgttgattttaatagattattttttagagtagttttaggtttatagtaaaattgagtagaaagtatagagattttttttatattttatgtttttatatgtataatatttttttattgttaatattttttattagagtggtatatttgttaaaattgatgaatatgtattgatatattattattatttgaagtttatagttaatattagagtttatttttggtgttgtatattttatgggtttggatagatatatatgtgttcgttattatagtattatatagaatagttttatggttttataaatttttcgtgttttatttatttattttttttttttttttgttcgagtggaatttttgtttttattttattttattttttgtttatttatttttttgagataggtttttgttttgttatttaggtaggagtgtggtggtataattatagtttattgtaatatttattttttaggtttaggtgatttttttgttatagttttttgagtatttgggagtataggtatatataattatgtttggttaatttattttttttttttttttttttttgtagagatagggttttggtatgttgtttaggttggtgttaaatttttgggtttaagtaatttttttgttttagtttttgtaattttaaagtgttgggattataagtatgagttattacgtttggtttgtttttatttttaaaaattatttgaggaattggttttaattttagttttgtgttgaatttgtattatatatagtttagagaatttttatttatgtagggattgtagatattttttttttattttttttttttttttttttttttaaataatggtaagttagtgtttatattgtgtattagtttattttattttttgagatttttttgatggtttgttaatttggagatatttttggataaatgataaatttttggtagtataagtttaaagtagtaaggttttgttttagatattggagttagaatgaaatttaaaaatggttttttgtttttatattgttggtgggagtgtaaattagtttaattattgtggaagatagtgtggaaatttttgaaggatttagaattagaaatattatttgatttagtaattttattattgggtatatatttaaaggattataaattattttattataaagatatatgtaaatgtatgtttattgtagtattgtttataatagtaaagatttggaattaatttaaatgtttatttaatgatagattggataaagaaaatgtggtatatatatattatggaatattatatagttataaaaaagggtgagtttatgttttttgtagggatatggataaagttggaaacgattatttttagtaaattaatataggaatagaaaattaaatattatatgtttttattcgtaaatgggagttgaatagtgagaatatatggatatagggaggggaatattatatattagggtttgttagggggtgagggatttggggagggatattattagaagaaatatttaacgtagatgacgggttgatcggtgtagtaaattattatggcgtgtgtatatttgtgtaataaatttgtacgttttgtatatgtattttagaatttaaagtataataaaaaaattaaaaaatggtttttattttttatttataaattatgattattttatttaaagattataaattttaaagtgatataatttttttgggtagttttaattaaaagagttgtattatttttgagtttttttatgtatatgttaattattttttttttgttatattttgttttgaagtgtttgtttagatagtagtatttattaattattaatttttgtgggatgagtaattgatttcgtagaaaattatttaaagggtttgttggttggattgagttaattatatttttttttttgagaatggggattttgagatattgagttgattagataatggttagtttttgggttgaaatttcgtatagaattgtgattattttttgaattatagtataaaagacgtgtaagttgggggaataaaaaaagttatagatagtagagatagtagaggtagttagtgtatagagagatgtgtttgaacggagtagaaatgtggatattttgagatgtggtaggagtttttagttttattttttatttggattagttaaattttttttttttttgggtgttgtttatgagatttttggttatagtttttttataatatttttttttttatttgatttgtgttagttgagtggatttttgttttagagttgaaatgtagtgttagtagaatttagtgtaatagagttttatgtaattaaagttttaaagattttttgggttgtgagatatataaaaagatagaaaattaaggttgataattagtataaaataattatatgttggggtattttttagttagttaatgttttttttatcggtaggtatttagtgattcgtttattatttttttttcgtcgaggttaaagaatgtttacgttattttatttttttttaaaaaagaaaaatattttgttgttttttgtttttttattgattatatttgtttttaatttttttatataattttaggtagaatattagtttaggtgttaggggatgtgggttttgtttttgttggggttttaacgggatggatggtttttgtaaggttttttatttttttgtatttttatttttatatttttgtcggatagtgaagagttatgttgattatcgatttttagttgataatttttataaaataaggtgtgaataaagagtgtgaagaaattaagttattttataggtatttgttatagatgaaataaatatgtttattttttatttaatgatgttaattttaagaattttgttagtaagtgaaaagttagaaaatgaaaaattatttttgttaatttttttgttgttgttttggttttgttttttgagatagagttttattttgttatttaggttggagggtagtggcgtgattttttagtttattgtaatttttacgtttcgggtttaagtaattttcgttatagtttttcgagtagttgggattatagatatatgatattacgtttaattaattttttttatttttagtagtgatagggttttattgtgttggttaggttgggttcgagtttttggttttaagtgatttattcgtttggttttttaattgtagtcggttaatttatgtttattttagtggtaaaagttatgatgtgttttattttaatttaagatgtttaaatattttttataaatagaaaaatatattattgagtaatgaaaattttttattagtaaataatttaaaattaaataaatgtaattggtatataaaatgtgttaaaatgatgttttgttgttttaataaaaaagaggaggcggggtcgggcgcggtggtttgtgattgtaattttagaattttgggaggttaaggtaggcgaattacgaggttaggagatcgagattattttggttaatatggtgaaattttgtttttattaaaaatataaaaaaatttagttaggcgtggtggcgggtgtttgtagttttagttatttgggaagttgaagtaggagaatggcgtgaattcgggaggttgagtttgtagtgagttaggatcgcgttattgtattttagtttgggcgatagagcgagattttattttaaaaaaaaaaaaaaaaaaaaaaaaaaagaagaggtttgatgggattgatggaagagggaaggagttatattttggaaggtggttggtgagttaggtgataaatttttaaggcgtgtatttagtagtaaaagtgtttaataatattttttattggggattttgatagtagaagaaatttttaatgtggaaatttttggtatattggtagaagggaatttttagattaaaaaaaaaagtaagatgtaattttgtttttttttttgtaatttgtaatttatatatttttttgtaggatgcgatattagtttttcgaagttgttatagtaaattattataaatttgttggattaagagaatagaattatattttgttgtagttttggaggttaaaagtgtgaaaattgatatggttatattttttttggggatattttttttttatttttggcggttagtatggtatttttgggtttgtggtcgtatttttttaatttttgtttttgtttttattttgttgttttttttgtgtttgtttttaatttgttttgtttttgttataaggttgtatgtggtttattttattttgatattttaggataagtttttttttttaggattttgaatgttattattttgtagtagttgttgttgtataaggtaatagttatttttttgttatgtaaagtaatatttataggttttatgtgttagtgtgggaatgaggtgtcgatatttgggttgttaattttttgttgtgggagattgttttgtgtttggtagatgtttagcggtgtatttggtttttgtttattgggtgttagtgatattttttttttagttgtgataattaaaaatgtttttaaatattgttaagggttttttttggggtacgattgtttttggttgatgagtattgttttaatttaattagagtttatttttattttatttaaatatgttgattgggaagtttttagtttcgttaagaagggggagggtggagaatggatgttggagaggtgattgtttttttttattatatttaatattttagtgaagtttataaatgggttaaatcgagtaggattatgaaatttttgttagatttttgttagtgtattttaatattgtggtattttatattagttaattaaattttaatattatgttttaaaaaaatttaatggatttttgaatttttaggttgggttttttttattttatttatgttaaatatgttaaatatttaggttgttttttattttagaatttgtttatgtattattttatttttttttagtaggtttttttttggaggtttttatatttagttggatttattttttttgcgattgttgtttgttttttgttttgttatgcggtattagtagagtatgaattgtatatttagtatagtagtttatgtattagagaattaggattggaatttttttgaagtattttatttttttgtgaaataattgaaatagagtatagatatatttgttgttttgaagtttttatgatttttaaagtaataaatgtgtatttttatagttttcgggtggttgatttttggagtgtttgtcgttttttcgggtggttgttttgtataggtttttttttcgtgttggtttgtaagtgttttcgttgcgacgggtttttgatcggtattggatgagaggattagtattggtgtagatgttggtataaataaaagttgtagttttttaattatgattaaggtatgggagaggttgatatataattgtggggaaaagcgagagagattagattgttattgtgtttgtgtagaaagaagtagatataggagattttattttgttatgtattaagaaaaatttttttgttttgagattttgttaatttataattttatttttaatttcgtgttttttgaaatatgtgttgtgttaatttagagtggaatggattaagggcggtgtaggatgtgttttgttaaatagatgtttgaaggtagatgattaataaatattaagggaatttagaggttggcgggattttttatatgttgaacgttggtttttcgggtttttttatttttttttttatattttgtttttgtgttttttttttttttaaatttttcgttttattttacgagaaatatttataggtgtgtaggggtaatttatttttataataatggtttttagagtgttttttttagattaataaaatatagtaaaattacgtgataattaggttggaatgtatgtgaattgttcgagtgagtttgtgttatttgaattgtattgggtagtatttaggggttttatgtaaggtatgaagggttttagaaagaattcgttttttgtttttagttgtattttatatgtttaatatatagtatagtagaagtaattagttttttttaatgttatttattttataaattatttttttttatatttacgtatttttttttgtatttaattttattaatggattatttgatttttagttttgttggtttagaatttttgtgtttattttaagttttttaaggagaaaaggattattgtaattattttttaacgagtttgtaaaaataatttttttattatagtattgtgttttatagggtttaaaatttgatcgaatgattgattttatatatattttttttagattttttaggattattgtttttttagaggttttttttgttttttggaaaataggtaggggaagagggatttagaaatggtagtatttattaagatagttaaagtttgataggaagagatatttattttattgtggtaattaaagtgaaaatgggagaataagaaggtatgttgttttttttttaggagttttggtaagggttttagttttaaaagaaagagatatagttaattagattgaaatgatgtggagtttatttttttatagttatattttattgagttattttttaataaatggattaaattgttttttggaatttagtaggtggtgtttttgtgttatagtatagtatcggttttggagaggttttgagagtatagcggttggttttagggtttgtgttttgttagtttttttttatagttgttaggtatatatttggagggtattatatggttggtttggtgagaggttttttgtttttggaaatgagggggtgaattaaggtttttattttttttagtttgtttgagttttgttttttaggggaatttaaatgagaggttttttaattttttaaagaaaaaaaaaatgtgattgtttatttaaataattacgatgtgtattgttattagttttttaagattttttatattgttatttatttgtgattttttaaattaaagtttttttttatataatttagggtattatttttgtttatgtttttttttatgttaatgtttgttttttgtttaagttttagagaagatgtagtagaaagaaataaatatgtagtagagaaatttggaagtgatgaaggaatataggtgaaagttatcgagtttatgtagtagttagtagtaatttagttgataatagatttttttggtaggagtttattgttttattttttttgttatataatgagttttttggttcgaagttggttgtgatattatgatggtgaataaggaatttagttaagtttatatttggtgatgttggagaagtgtggtgggtaaagaagataaatttaaatttagagtgagttatttattataaggaggataaatttgttgtttgaagtattttagggtttgtttttttattaagtttttgtaggggttgtataaaacgaaagttattttatttatatttattaattggtaggggagaggtaaaatgttagtgggatttatagtttggatgtgttgatttgatttatttagttatttgtgatgtcgaaaggttattagttaggttcgagtgaggttaggttgtggggttagtagttgggtttttgagttgtgttgttgtagatttagtgatgtgtagtgtgttttgttaagatagagtgttttttttttagtttattgtttagtattttgtgtattgagtttttaggttttaatgatcgtagttttgatttatatattttgtagttgatttttttttagttattttttaattttgtttttttaatttatatttttttattttttaattagtttttttaaaaagtattttaaatatattgatttttgttggttttaaaaattattttaaatatattttgttgggattattttagtgttttaagtatattttgttaggattttttagtatttaaatatatttatttgttggattgattaattttatttgaagtgaatttgtgatttaatgtttgatattgttagttgtatttatttttttatgtattttagaattttggttaaatgatatgttttgaatgaggttttaaaaattttttatttatttagttatttttcgtttttttttttttttttgtatatttttttttgtgtagttttattttgtttgtttttgtttggtttttatggagtttgggtgtagaattagtttttatagtgggggtttagttatttgggtatttatggttgttttacgtagtgtttggttttgtttgataggtgttttttattttttttagatcgttattttataggaggtaaggatgttgcgagtttttttttaggtatggaggggtagggttttagttagtattttttattttattttttagtaagggtgttagttttttattttgtcgtttgtgtttttgtttagtttttaatttttttaagatttaaatttatagttttattgtttgtttttggattttagtataggaggggttggttgtttatggttttgttttcggggttttgtttttttgtgtttttgtttcgtatcgattttatagaaatgtttattttgtgtgtgtgtttgtttgtatttttttttttttttttttttatgtttttttttttattgttgtatgtttggagtaaagagaatttatttaaaagtgaatttatcgtgttattttaattggaagttatatgggtagagagtttaaaggaaagaaagatatttggttttatatagtattgaaagttaattataagaacgttttttatgtgagtttagtgatttatagtatatagttatttaaatttcgtttgaggtttgtaggttttaaaagatgagtgggattaggtaggtgggatttattagggtgttatggttttttataaaggttttattttttattttttattttggtggtaattttttaaaaatttataattttatatatttaaatgtttgtaattttaattaagtaatgttttaaaattttagtgtttggagttgtgtttgtattggtgttaaggagtattgttttaaatatagggagatattataaaagaatagaggtgaaaatgtaaataacgtgtttgagttaagagattgtcgttgtatagtggttttgaagaggaaagtgatgcgtgaattaagttgtttttttgtatgtgttagtattggttagttaatagaatttgtttgtcggtattaagttttatatggttagtttaaagtgagttttaatgattgtattattgattacgttgaattaattttgttaatttaaattttatttattttgtagatttgttggtatttaatttgtatattttttatattgtggttgtgtaagagttataagtataaaggttttattggtttatgtttgttaatatttaattaataagaagaatgattttagataatattgggagtttttaatagtttttaagtttgagaattatgggttaaatggtaatttaatttttgttgttggttgtagtaagtattttgtatttgattttgatgtttttagtttatttttgtttatgttttttgatttgtttagtttaggatcgtttttttttggggattttgatatttttatgtcgggttggtgttttttttttatgttgtttgtagttttttgtgttttttttttttttagttttttttatagtgtaatttgtgtatgggttttaatttttttattagttataagttgtttgagagtggggaatattgttatttttttatttgtagtgatttttagagtttttgttataaaataggtttttaataaatgtatgggtttttttgtttttgtttaggtagtaataaattatttgtagaattaaggagagaaagaggtagaaataatttggagttaagttataaggtaagaagaagttttttaatattttaataattaatgtgttttttagtttattttttaattggtttaattaaaatttaagttttattgttaggtaagtgaagtgaggataagaaacgtaaggaaaggaagtaatgattgtaatagaatgtatgagggaaggttggtattttttaagttcgaatgatggttttttggtgttttgatggagaataaggttagagatttttgttttagtagtttcgatggtaagcgttgtggtgaagggatgtttttattttgaagttaagtttagagaatagtttttttttttttattgttgaggttttgggtgggagaattgagtttagtaaatttttagagttatttgttagatttagtttttttaattttttgtaaagttatttgaagagtatatatatatattttgtatttggattgaagttgttttttttaattttttaggtttagattttgtttataattgaggtttgtttgaaattatttgtaaattttaggtttgtgtttttgattagattattttagaggtggaacgttattgatttaatagagaaatagttagttttttttagtggaattttttttaaaattttattggttttaggaggaaaaatattatttgttttttttataagtatttaatgggaataagaattttttattgtgatttttaaaaaaaaaaaaaaagttataaatataggggtaaattgattagttttattttgtgaagtgaagtaaagaaatattatattttagtaaattaaaaatagttattaggtttttattaaggaagaggaagaattttgttaatttaagtggaattgaatataaattttttaattttatatttgattatattttagggggttttaaatattttttgataaggttatggtgtttttagttgatgatattgattgattggaagttaagtatttgatttgttttttttttttttttttataattagtgtgttttgtagtattttttttatatattttttgtttggtgtttattttatgagagaaaggattttatgttgagggtaaatgggaaaaaagtgtattttattaggtcgtttttattttgagaagtttatatggtttatatttggtatgagtagatttagttttttgggtttagagatgttttagattaaaggaaagtatttttagatttttttgtttttttgataggtattatgtatagttatttttgtgtggtttaaaatgagttttgttttaaatgttaataattttggagttataggggtttttattaatataaaattagttagaattttatttgttttattttttttttataatagttttgttgttttttttatgtatttattttttatatatttgtttagtatatatttattatgtttttataatgtgttaagtattgtgtgagtttgtgggttttaaaatatgtttagtaaattaggttttgagatgtgttagttaggatgtgtttgattgtaagtaataggaaagttaaagaatggtgttaagggattaagtaaaaagagtagttttatatttggtttttttattgttttaattatgttgtgaggatacggggttgtgatttttttttgttgtttgtagtatgttggttagtttttttaggtttttttatttttgggttttaaggtgattgttatcgttttgagtattatataaagattattatgttagatatggaaaaaagtgaatttatttaaaattgaggaaaattgagaaattttttgttgaagtttagtttttatgttttatatttttataatatatttgtttttatagtttgataggcgagtaaaagtaaatattatgattggtttgtattagttatttttaaaatgtggttgagggtttagggttttcgagatttttttaggaggtttataagggtaaaattatttttataataatgttaagttgttatttgttttttcgattcgtattcgtttattagtgtgcggtggcgttgttaagaggttatatgatagatgatgatgatttttttttgatagttaatggaatgtgtgtttgtatattttgtttttttaattgtttttagttttagtttttggtggtaaatatttatttatttatttatttatttatatttatatatatatagatatatatatatatatatatatatatatatatatatatatatatatataaataaaattttttggggtttttagtaatattgaaggatgtaaatgggttttgagaataaaatatttgaaattatttgttttgtgtgaattaagatttatttttggtattggcggatattttagtttttttaagatatatggttttgagatttttggataaaatttttaataaagaggaaatggagagtttagggttgttgggtgggtaattagtagtgtgtgtagttttgttttgagggggttttgaggagatagtagggtagggatgtagtatgttttttaggttttatttttgttgggttagttaggattggagttattgtaggtttgttatttgtgtgttgttggttttttaattgtggtaaatataaataagattgtaattattttaattatttttatatgtaatttagtggtattgattatattaatattgtttaattattgtcgttatttatttttagaattttttcgttattttaaatagaaattttatttattaagtagtaatattttattattgtttttttttatgaattaatttgtttttgtgaatttgattattgtaggtattttatttgtgtggaattaaagaatatttgttttttcgtattttgtttgattttatttagtatggtgtttttaagatttatttttgtatgtattagaattatatttttttttaaggttgaatgatattttagtgtgtgtatatgttatatttcgtgtatttttttttttattgatggatatttgagttgtttttatttttggttgttacgttgttatgaaattgggtgtataaatatttttttgaaattttgtttttaatttttttgggtatatatttagaagtgggattgttggattaatggtaattttatgtttagtttttttaggaattattatattgtttttcgtagtagttgcgttattttatatttttattagtagtgtacgagagttttggtttttttgtgtttttattaatatttgtcgttgtttttttgatagtagtcgttttaagtgaagggagatggttttttgtttgtttttaatgaattaggatgtattgttttagtttgttatttagcgttttttttttttttgttatttttttttagatattgtttaagtgttttaatgtttttatttttttttgtttttatgaattgtgtttggtgagttttatatttttgtaaggtatattttttatgaagtttttgaatatattttttttttaaaggatagaatttattaaaatgaggaatttttagttttgaggtaatattttttgttgtttgttgtattttgaatttgagttatgttatttcggtgatttagattatgagtttttgtggatagtggtgtatttttgtattatggttatttgagtttataaaatagtatttaataagtaattaaatttttgagtaatttatatgtgtgagaagaagggtaatggtagtggttttaagttgatgttattgtgaattggtttttttttagtattttggatgtttgtatggttttatggttggttttttttggtattttattttagttttttatttttttttgtttttgaaggattcgtttttatttggtaggaaatagggataggattaagtatgtgtgggttttttattggatattgttttttgttttagcgtttgtatttttttgtttatacgattttgttttagttttttttgtataggaatttttgaaggtttttatttaatttttttatttttttttggaaatatttattgagggatttaatagtttttgttgtttttagtttgtatacgtggagaaggtgaaattatggtttgttttgattttttagggattgggtaaatgtattaaaagatatattatgtaagaaatggaaaaagtggatttttttttgattttttatgttaattgtttttgttgtattagtatatgttgtgcgtgtatgtataaaatatttgttaatattttgagtttttaggaaatatgttataaaatatttattttttttattttttaaaaatgttaaatagtatttttttaagagttagtaatgaaatgaatttaggtatatatattaggtagaattataagaaagttaaggatttatatttggagtaagataaaggattttggtattgagtaaaaaatatagttagttgttaattgtttaataggtttgtagattatttgcgataaaaaagtagtatatttgtgaaaaaagttgaaattattataaatttgaagaattagttttattttttaaggtatgtattttttggagttgtacggaagttattttatatgtttgtttcgggtgatattgttttattttttcgtgaataatgaattgaacgtttttttttttttgtgataaagttttttggggtaaagtagtagtcgtataggtaagatagggggtttagatagtaggttttggatttttttttttttagagttaggattggaaaaatggagttattatttgaggattggaaggaaaaggagggagtaagtgttaggattgttatttttgtttattttggtgggtggttttaatatttttagatagagaatttagttaaaaaaataaataaatagaaaatatatattattttaataatttgtaaaattttgttgtatttattaagtattgtttatttttatttatatttataaattataatattttttttttttttttttgtttgtggggtgatgtttttatggtaaatgtgtatttggaagttttttttttttttttatattttaagttttgagatatatgtgtagaatgtgtaggtttgttagttaggtatatacgtgttatggtggttttttgtatttattaatttgttatttatattaggtatttttgttaatggtattttttttttagttttttaattttttgataggtttcggtgtgtgatgtttttttttttgggtttatgtgttcgtattgttcgatttttatttatgagtgagaatatgtggtgtttggttttttgtttttgtgttggttgttgagaatgacggttttcggttttatttacgtttttgtaaaggatatgaatttagttttttttatggttgtatagtattttatggtgtatatgtgttatattttttttatttagtttattatttatgggtatttgggttggttttaagtttttgttattgtgaatagtgttgtaataaatatatatgtgtgtatgtgtttttatatagtaggatgatttataatttttatatatttagtaatgggattgttgggttaaatggtatttttggttttagatttttgaggaatttttatattgttttttataatgattgaagtaatttatatttttattaatagggtaaaagcgtttttgtttttttatatttttttcggtatttgttgttttttgattttttaatgatcgttaattttaattggcgtgagatggtgttttattgtggttttgatttgtatttttttagtgattagtgatgatgaatttgtttttatatgtttgttggttgtataaatgtttttttttgagaagtgtttgtttttattttttgtttattttttgatggggttgtttttttttcgtaaatttgttttaagttttttgtagattttggatgttagttttttgttagatggatagattgtaaaaatttttttttattttgtaggttgttcgtttattttaatgatagttttttttgttgtgtagaagttttttagtttaattagattttatttgttaattttagtttttgttgttattgtttttggtattttagttatgaagtttttgtttatgtttatgttttaaatggtattgtttaggtttttttttagggtttttatggttttaggttttatatttaagtttttaatgtattttgagttaatttttgtataaggtgtaaggaaggggttttaatttagttttttgtatatggttagtagtttttttaatataatttattaaataggggattttttttttattgtttgtttttgttaggtttgttaaagattagatggttgtagatgggtggcgttatttttgaggtttttgttttgttttattggtttatatttttgttttggtattagtattatgttgttttggtttttgtagttttgtagtatataatttgaagttaggtagtgcgatgtttttatttttgttttttttgtttaggattgttttggttatatggatttttttttggttttatatgaaatttaaagtagttttttttaattttgtgaagaaagttaatggtagtttaatggggatagtattgaatttataaattattttgggtagtatgattatttttatgatatttattttttttattcgtgagtatggaatgtttttttatttgtttgtgtttttttttatttttttgagtaatggtttgtagttttttttgaagaggttttttatattttttgtaagttgtatttttaggtattttattttttttgtagtaattgtgaatgggagtttatttatgatttggttttttgtttgtttgttattggtgtataggaatgtttgtgatttttgtatattgattttgtattttgagattttgttgaagttgtttattagtttaaggaaattttgggttgagatagtggggttttttaaatatataattatgttatttgtaaatagagataatttgattttttgtttttttatttgaatatgttttatttttttattttgtttgattgttttggttagaattttcgatattatgttgaataggagtggtgagagagggtatttttgatttgtgttagtttttaaaggaaatgtttttagtttttgtttatttagtatgatatttgttgtgggtttgttataaatagtttttattattttgagatacgttttattaatatttagtttattgagagtttttagtatgaagggatgttgtattttatcgaaggttttttttgtatttattgagataattatgtggtttttgttattggttttgtttatgtgacggattgtatttattgattggtatatgttgaattagttttgtattttagggatgaagtcgatttgattgtggtggataagttttttgatgtgttgttggatttggtttgttagtattttattgaggattttcgtattgatgtttattagggaattggtttgaaattttttttttttgttgtgtttttgttaggttttggtattaagatgatgttgattttataaaatgagttagggaagagtttttttttttttattgtttggaatagttttagaaggaatggtattagtttttttttgtatttttggtagaattcggttgtgaatttgtttggttttgggttttttttggttggtaggttattaattattgttttaattttagaatttgttattggtttatttagggatttaatttttttttggtttagttttgagagggtgtaagagggtgtatgtgtttaggaatttatttattttttttagattttttagtttatttgtgtagaggtgtttatagtattttttgatggtagtttgtatttttgtgggattagtggtgatattttttattattttttattgtgtttatttgatttttttttttttttttttttattagtttgattagcggtttatttattttgttaattttttttaaaaattagtttttggatttattgatttttttgaagggttttttgtgtttttgttttttttagttttgttttgattttagttattttttgttttttgttagtttttgaatgtgtttgtttttgtttttttagtttttttaattgtgatgttaggatgttaatttagattttttttgtttttttttgtgggtatttagtgttataaatttttttttaaatattgttttcgttgtgttttagagattttggtacgttgtgtttttgtttttattggttttaaataatttttttatttttgtttttattttattatttatttagtagttatttaggagtaggttgtttagtttttatgtagttgtgtagttttgagtgagttttttaattttgagttttaatttgattgtattgtgatttgagagattgttatgattttcgtttttttgtatttgttgaggagtgttttatttttaattatgtggttagttttaatagaagtgtgatgtggttttgagaagaatgtatattttgttgatttggggtggagagttttgtagatgtttattaggtttatttggtttagagttgagtttaaattttgaatatttttgttaattttttgtttcgttgatttgttttatatgatagtggagtgttaaagtgttttattgttattgtgcgggagtttgagtttttttgtaggtttttaagaatttgttttatgaatttgggtgtttttgtattgggtgtatatatatttaggatagtaagttttttttgttgtatttatttttttattattatgtaatgtttttttttgttttttttgatttttgttggtttaaagtttgttttattagagattagtattgtaatttttgtttttttttttttttttatttgtttggtaaatatttttttatttatttattttgagtttatgtttgtttttgtacgtgagatgggtttttttatagtatattgatgggttttgattttttattgaatttgtaagtttgtgttttttaattggggtatttagttcgtttatatttacggttaatatttttatgtgtgaatttgattttattattgtgatgttagttggttattttgtttattagttgatggagtttttttatagagtcgatagtttttataatttggtatttttttgcggtggttggtattgggtttttttttttatatttaatattttttttaagagtttttgtaaggtaggtttggtggtgatagaattttttagtatttgtttgtttgtaaaggattttatttttttttcgtttatgaaatttagtttggttggatatgaaattttgggttgaaaattttttaagaatattgaatattggtttttatttttttttggtttgtagagtttttgtagagagattcgttgttagtttgatggatttttttttgtgggtaattcgatttttttttttgattgtttttaatatttttttttttattttaattttggtgaatttgataattatatgttttggggttgtttttttcgaggagtatttttgtggtattttttgtattttttgaatttgaatgttggtttgttttggtaggttagggaagtttttttggatgatattttgaagagtgttttttaatttggttttattttttttgttatttttaggtatattatatattaattaaacgtaggttttgtttttttatatagtttcgaattttttggaggtttagtttgtttttttttattttttttttttttaattttttttttatgttttatgttattaagttgatttttagtttttgatatttttttttttgtttgatcgatttaattattgatatttgtgtatgttttacgaagtttttatgacgtgttttttagtttaattaggttatttatattattttagttagtagtttttttaatttttttttaagatttttagtttttttgtattgggttaaaaaatgtttttttagtttggaggagtttgttattatttattttttgaagtttatttttgttagtttgttaaattaattgttcgtttagttttgtttttttgttggagaggagttgtgattttttgtaggagaagaggtattttggtttttggaatttttagtttttttgtgttggtttttatttatttttatggatttatttatttttggtttttgatgttagtgattttcggatggggtttttatgtagacgttttttttgttgatgttgatgttatttttttttgtttgttagttttttttttaatagttaggtttttttgttggagtttgttggaggtttattttagacgttgtttgtttgggtattattagtggaggttttagaatagtagatattgttgtttgattttttttttggaagtttcgttttagaggggtattcgttagttgttagtcggagtttttttgtatgaggtgtttgtcgatttttgtttggaagtgtttttttgttaggaggtatgcgggttagggatttatttgaggaggtagttttttttttagtagagtttaaatgttgtgttgggagatttgttgttttttttagagttagtaggcgggaacgtttaattttgttatagttgcgtttatagttatttttttttttaggtgttttgttttagggagatgggagtttgatttataagttattgattggggttgttgttttttttttagagatgtttagtttagaaaggaggaatttagagaggtagtttggttatagcggttttgttgagcgaatatttttgcggttttgtttacgttgttaggggagaatcgtttttttaagttttagtaatgggggacgtttttttttttattaagtttaagtattttaggttgattttagattgttgtgttggtagttagaattttaagttaatggattttagtttgttgggttttttgggagtgggatttattgagttagattatttggttttttggttttagtttttttttgaagggagtgaacggttttgtttcgttggtgttttaggtgttattggtgtatgaaaaaatttttgtagttagttcggtgtttgtttaaatggtcgtttagttttgtgtttaaaatttagggttttggtggtgtaggtatttaagggaattttttggtttgtaggttgcgaagattatgggaaaagcgtagtgtttgtgttggaatgtattattttttacggtatagttttttacggttttttttggttaggggagggagttttttaatttattgtgttttttgggtgaggtgatattttatttggtttttgtttatttttcgtgggttgtttttattgtttaattagttttagtgagatgagtcgggtattttagttggaaatgtagaaattatttgttttttgtattgattttgttgggagttgtagattagagttgtttttattcggttattttgttagtttgtggaggttttaaaaattattttttaattgtagaaagtaatatattgaaaagtatataaatacgatttatattttggtgagttattaaaatgtggatagatagttattgttatataggttaggaaatagaatattgttagtattttggtgttatttttgtatatttttttaatagtatattttttttttttttaaagtagggttttttaagtttcgggttatagatcggtattagttcgtggtttgttaggaattagattatatagtaggaggtaagtagtaggttagtgagtattattggttgagtttcgttttttgttagattagtggcggtattagatttttataggggtatgaatttttttgtgaattgtatatgtaggggatttaggttgtacgttttatatgagaatgtgattaatgtttgatgatttgaagtggaatagttttttattttataaatatattttttttatttttgttttcgttttggtttatgaaaaaattgttttttgtaatgggagatgggtgtattagaattttataagttattattaaaggatttatcgtgtaattaaatattatttgtttttttaaaatttatgggaataaaaaattttttaaaagagaaatatttgaaatagtaattattgagaattttttaagttaatgttagatattatattattaatataggaagtttttttattttgaatggaagtcggaagaaaaatgtattttatttgtagaggagtagaatatttaatttttttttagaaattatgtaaggaagaagagagtggagtgaaatatttaaaaatattgatttaaaatgttgagagaaatattttatattattaagaatatgagtttagatatttttagggatttagattaagagagtttttgaatgattgagttttatttgttaagatttagatttttagtagggttagatatgtttaataggtgtgattattttatatgtggtcgatggtatagggtattttaattaattagatgttggtagtagttattatttatattttttggttattataattatagtattatgtttttattttttttagttttagaggttgtggagtagtatattgaggattagtgtattgtatgatttttaaagttgtttgtatttaaaataattagatatatttttattgttgagcgaaggttgtttgttttttttttttttttagatagtttggttgttttatataggttggagtgtggagtgtagtggtgttattttagtttatagaggttttgaatttttgggtttaagcgatttttttgttttagtttttagagtagttgggattataggtatttgttattatgtatggttaattaaaaaaaaaaattttttttttttagagatggggttttggtatgttgtttaggttggttttaaatttttggttttaagcgatgtttttgtgatcgtttgttaaatgttgggattataggtatgagttattgttttaggtttgtatttttttttttttttttttgagatagagtttcgttttgttgtttaggttggagtgtagtggagtgatttcggtttatttataagttgttttttaggtttatgttatttttttgttttagttttttgagtagttgggattataggcgtttattattacgtttggttaattttttgtatttttagtagagatggggtttcgttgtgttagttaggatggttttaattttttgatttcgtgattcgttcgtttttgttttttaaagtgttgggattataggcgtgagttacggcgtttagtttcgggtttgtaattttatttgaataaaatgtttgttttttttattaaaaagttttttattttattgggtttttaaatatttaaattgatttgtatttagtgttatatgaaatatataagaaatttattagtttgttagtttttttagtttttttgtttttttttttttttttttttttttttttttttttgaattagttttattttgttttttaggttgtagtgtaatggtgcggtttcggtttattgtaatttttgttttttgggtaagtgatttttttgtttttgttttttaagtagttgggattataggtttttgttattacgtttagttaatttttgttatttttagtagagatggggttttattatgttggttaggttggttttaaatttttgattttaggtgatttatttatttcggttttttaaagttttgggattataggtgtgagttattgtgtttcgtttttttagtttgtttttttaaggatatagattttagagttagattttggatttatattttataattatagttttgttgttaattagtagttatttttttttagtttttatataattttattttgggtaattatgtaattttttggtgtttttgtaaaatggagatgataatagtatttattttatagtgttgttgtaatgattaaattagtatgaataaagtatttaatatattgttaagagtatagtgtaaatgtatgtaagtataaattattattatatttataaaatgagatattattaattaaattttatataggtaatataaaaatattttaaaattttttttggtggggaattattttttaaaaattaaattattggttgggtacggtggtttatgtttgtaattttagtattttgggaggtagaggagggcggattatttgaggttaggaggtcgagattcgtttagttaatatggtgagatttcgtttttattaaaaatataaaaattagtcgggcgtggttgtgtgtgtttgtaattttagttatttgggaggttgaggtaggagagtcgtttgaatttaggaggtggaggttgtagtgaattaatatcgtattatttaattttagtttgggagatagagtgagatttcgtttaaaaaaaaatatataatataaaaataaaattaaattattttatttggagaagcgttttgttgtggtatttagtttagaattgtattatgaggaatatcggtgaattatttattttttaatttagtattttttgagtgtttgttaggtatatgttgtattttaggaagatagggaatttatatattagtagaggaagcggtaattaagtgaacgaataaagtttaggataattaattggaattagtagaaaggatttgttgtgtgtatgaagtagatgagaggtatgggttggatcgtggtgagttggggagagaggaaataagggttgttagagacggtgttggagttatgttttgtagggtttttaagattttagtaagtagttgggagtatttacggggagtttaagtttttttttaaggaagcgtgaagagaggttttatttaggggaatgtgttggttttatttatatttgttaaagttttttttgtttattgtatagagaatgaattggagacgggtaggtttagtttggtagtagataagtgtaatattttagggttaggttgaggggtggtaatgaggtggaaggaagtgtatgtagttaagtcggattatatatatttattttggtggtagatttgataggtggtgatgatagtttggatgaggaagataatgaggaggtatggatattatttagatttttggttaagtgttattttgatagttgtatatattttttttattattaaattttttttttatttagatatgattttttttaaaattgtaaatgttttagtgtgtgtgttgtttaagtgaatatgaagattgtatattttttaggtattttaaaattttttcgatttagatttttttgtattgtagttaaattgtatagtcgttttaaattttttttttagtaatgggaattttttttgttgatattttgggtatttaattgggagtattttatttgttaattatggttgttgaggattttaaatttattttatttattattagttttttgaaattatattgttgaatattttgtttgttttggggagtgttagagtttgtgaaggtttgtatttgttgagaggtagtttttttttttttgcgatttttgtttttggtttttatgggtgatgaagggttgtgggatgggaggggtagttggagtcgttgagttagttttatttgagttttattgtgtaattttattgttttttttagtatggtttttaggggtaggaagttaggtttatgagattttatttattgttattgggattagtatatttttttagtaagtggaatttattattattttattaaaatatggttttttcgtgtgaatgaagtgagattaagtatataaagtaatttttagttaaaagattgtttaaattgttatatgtggaataaattattttatttttttttaagaaatgaagagaaattgggaaaaaaattcgttagatagtaatgtatagagatttttttatatttaaatgagaagttagaaatttatataaaatataagaattttaaaaatattttttaggtatagattattattaaatatttatggatgttttttattttttattatattaaaatatttaagttaattttatatttagaatatttaaaaatagtttaattttaaaaagaagatataaagtattattagttgtgttttttgtgtataattagcgtgtgtttgtggaggtataaagatttttagtttaatgatagtattatgataaaaagtttagatggtaaaaattggagttttagttggatgatatattttataataatttaaagatggttttagtatagaagttatgttattttagttttttgtaattttttttttatttattaatgggtcgtgaaggtattgataaaagagttttttagaaatgtttttatttgtttttttttttataga

SEQ ID NO: 128 - DNA, 73334 bp, Artificial Sequence
  chemically treated genomic DNA (Homo sapiens)
tttgtaagaaagggaataaatagaagtatttttaaaaggtttttttattagtgtttttacgatttattgatgggtgaaggagggattataaagaattaaaatagtatggtttttatgttggagttatttttgaattgttataaaatatgttatttagttggagttttaatttttattatttgaattttttattatgatattattattaggttagaagtttttatatttttataggtatacgttaattatgtataaaaagtatagttgataatattttatattttttttttaagattgagttatttttaaatgttttgaatatgaagttgatttgagtattttaatgtaatagaaaataaaaaatatttatgagtgtttaataatagtttgtgtttaagaaatgtttttgaagtttttatgttttatatgaatttttggttttttatttaggtgtaaaaaaatttttatgtattattgtttaacgaattttttttttagtttttttttattttttagaaaaaagtaaaataatttattttatatgtaataatttaagtaattttttaattaaagattgttttatatgtttgattttattttatttatacgaagaaattatattttagtaaaataataataaattttatttattgaggaggtatattagttttagtgatagtagataaaattttataagtttgattttttatttttgaaggttatgttaaaaagaataatggagttatatagtgagatttaggtggagttggtttagcggttttagttgttttttttattttataattttttattatttatggaagttagaagtaggaatcgtagaggagggaaggttgttttttaataggtgtaggtttttataggttttgatattttttagggtaggtaggatatttagtaatgtaattttaaaagattagtggtaaataaagtgagtttaaaatttttaataattataattaataggtaaaatgtttttaattaaatatttaagatattaataaaggaggtttttattattaaagaagaaatttgaaacgattgtataatttggttgtagtgtaaaaaaatttagatcgggaaagttttaaaatatttaaaaaatgtgtagtttttatgtttatttgggtagtatatatattagaatatttatagttttgagaaggattatgtttaaatgaaaagaaagtttaataatagagggaatatatgtaattgttaaaatggtatttagttaaaaatttagataatgtttatgtttttttattgttttttttatttaagttattattattatttgttaagtttattattaaaataaatgtgtgtgattcgatttgattgtatgtatttttttttattttattgttattttttagtttagttttggagtgttgtatttgtttattgttaggttgggtttgttcgtttttaatttattttttatgtagtagatagaaaaaattttagtaaatgtaaatgagattagtatatttttttgggtaaaatttttttttacgtttttttgaaaagaaatttaaatttttcgtagatatttttagttgtttgttggagttttgaagattttgtaaaatatggttttagtatcgtttttgatagtttttattttttttttttttagtttattacggtttagtttatgttttttatttgttttatgtatataataaattttttttgttgattttagttaattattttgggttttattcgtttatttagttatcgttttttttattggtgtgtaaattttttgtttttttagaatgtagtatatgtttggtaaatatttaaaaaatattgaattaaggaatgaataatttatcggtattttttatagtatagttttaagttaaatgttatagtaaaacgtttttttagatgaagtaatttaattttatttttatgttatgtatttttttttagacgaagttttattttattttttaggttggagttaagtggtgcgatgttggtttattgtaatttttattttttgggtttaagcgatttttttgttttagttttttaaatagttgggattataggtatatataattacgttcggttaatttttgtatttttagtagagacggggttttattatgttggttaggcgggtttcgattttttgattttaagtgattcgtttttttttgttttttaaagtgttgggattataggtatgagttatcgtgtttagttagtaatttaatttttaaaaggtaattttttattaaaaaaaattttaaggtatttttatgttgtttgtgtgaaatttaattagtaatattttattttataaatataataatagtttatatttgtatatatttatattatgtttttggtaatatattaaatattttatttatattaatttaattattatagtaatattatgaaatgggtattattattatttttattttatagaggtattaagagattatataattgtttaaagtaagattatgtaaaaattgaaaggaagtaattgttagttaatagtagagttatgattgtggaatatgaatttagggtttggttttaaagtttgtgtttttaaagaaataaattgaagaggcggggtatagtggtttatatttgtaattttagaattttgggaggtcgaggtggatagattatttgaggttaggagtttgagattagtttggttaatatggtgaaattttatttttattgaaaataataaaaattagttgggcgtagtggtaggagtttgtaattttagttatttgggaggtagaggtaggagaattatttgtttaggaggtagaggttgtagtgagtcgagatcgtattattgtattgtagtttgggagataaagtgagattgatttaaaaaaaaaaaaaaaaaaaagaaaaaaaaaagaaataaagaaattgaagaaattaataaattgatgaattttttatatattttatatggtattagatgtagattagtttagatatttgggaatttagtaaaatgaagaattttttgataaaagagataaatattttatttaaataaaattgtaggttcggggttgggcgtcgtggtttacgtttgtaattttagtattttgggaggtagagacgggcggattacgaggttaggagattgagattattttggttaatatagcgaaattttatttttattaaaaatataaaaaattagttaggcgtggtggtgggcgtttatagttttagttatttaggaggttgaggtaggagaatggtatgaatttgggagatagtttgtaagtgagtcgagattattttattgtattttagtttgggtaatagagcgagattttgttttaaaaaaaaaaaaaaaaaaatgtaggtttggaatagtggtttatgtttgtaattttagtatttggtaggcggttataggagtatcgtttgaggttaggagtttgagattagtttgggtaatatattaagattttatttttaaaaaaaaaaaatttttttttttaattagttatgtataatagtagatgtttatagttttagttattttagaggttgaagtaggaggatcgtttggatttaggagtttaaggtttttgtgagttaggatagtattattgtattttatattttagtttgtgtgagatagttagattgtttaaaaaagaaaaaaaggtaaataattttcgtttagtaatagaaatgtatttgattgttttaaatgtaaatagttttaggaattatgtagtgtattgatttttaatatgttgttttataatttttggggttgggaggggtgaaaatatggtgttgtagttgtgatgattagggagtgtgggtgatggttgttgttagtatttggttaattaaagtattttgtgttatcggttatatgtgggatgattatatttgttgggtatatttgattttgttgggaatttgagttttgataggtagaatttagttatttaaaggtttttttaatttagatttttagaggtatttgagtttatgtttttaataatgtaaggtgttttttttaatattttaaattaatatttttaaatattttattttattttttttttttttatatggtttttgaggagaagttgaatgttttgtttttttataggtaaagtgtatttttttttcggtttttatttaaaataagaaagttttttgtattagtggtatggtgtttgatattaatttggaaaatttttagtaattattgttttagatattttttttttaaaaaattttttatttttataggttttgggggaataggtggtatttggttatacggtaagttttttagtggtgatttgtgagattttggtgtatttattttttattgtagaagataatttttttatggattagggcgggggtagggatgggggggatgtgtttgtgggatgagaaattgttttattttagattattaggtattagttatatttttatatggagcgtgtaatttagattttttgtatgtgtagtttataagaggatttatgtttttatgagaatttaatgtcgttattgatttgatagggagcggagtttaattagtgatgtttattggtttattatttattttttgttgtatggtttggtttttaataggttacggattggtatcggtttgtggttcggggtttggggaattttgttttagaggaaaggaagatgtgttattgggaaggtgtgtaagaatggtattaagatgttggtaatattttattttttgatttgtgtggtaatgattatttatttatattttaataatttattaaagtataaatcgtatttatatgttttttaatatgttattttttataattaaaaaatagtttttaaaatttttataggttggtaagatggtcgaataggaatagttttggtttgtagtttttaataggattaatgtagaaggtaggtgatttttgtatttttaattgaggtattcggtttattttattgggattggttagatagtgggagtagtttacggagggtgagtagaagttaggtggggtgttattttatttaagaagtataatggattggggaatttttttttttaattaagggaagtcgtgagggattgtgtcgtgaggaatggtgtattttagtatagatattacgttttttttatggttttcgtaatttatagattagaagatttttttgggtgtttatattattagggttttgggttttaagtataaaattgggcggttatttgggtagatatcgagttagttgtaggagtttttttatatattagtggtatttggaatattagcgagatagaatcgtttattttttttaaaagggggttgaagttagggagttaagtggtttagtttagtggattttatttttaaggagtttagtaagttaagatttattggtttgaaattttggttgttagtatagtagtttgaagttaatttgggatgtttgagtttggtggggggaggggcgttttttattattgaggtttgagaaggcggtttttttttgatagcgtaaataaagtcgtagggatgttcgtttagtaaagtcgttgtagttagattgtttttttagattttttttttttgggttgggtatttttgaaagaaaggtagtagttttagttagtagtttatagattaaatttttatttttttgagatagagtatttgggggaaggggtggttgtgggcgtagttatagtagaattaaacgttttcgtttgttggttttgaagagagtagtagattttttagtatagtatttgaattttgttaagggaaagattgtttttttaagtgggtttttgattcgtatgttttttgataaggagatatttttaagtaggggtcgatagatattttatataggagagtttcggttggtaattggcgggtgtttttttgagacgaagtttttagaggaaggattaggtagtaatatttgttgttttgaaatttttattggtgatatttaggtaaatagcgtttggagtggatttttagtaaattttagtagaggggtttgattgttagaaggaaaattaataaatagaaaggaatagtattaatattaataaaaaggacgtttatataaaaattttattcgaaggttattaatattaaagattaaaggtagataaatttatgaagatgagtaaaaattagtataaaaaggttgaaaattttaaaaattagaatgtttttttttttgtaaaggattataatttttttttagtaagggaataaaattggacggataattagtttgataaattgatagaagtaggttttagaaggtgggtaataataaatttttttaagttaaaggagtattttttaatttaatgtaaggaagttaagaattttgaaaaaaggttagaggaattgttaattagaataatataaatgatttgattgagttgaaaaatacgttatgagaatttcgtgaagtatatataagtattaatagttgaatcgattaagtagaagaaaggatattagagattaaagattagtttaatgatataaagtatgaagagaaggttagagaaaaaaaaaatgaaaaggaataaattaagtttttaagaaattcgggattatgtgaaaagataaaatttacgtttaattggtgtgtggtgtatttgaaagtgataaggagaatggaattaagttggaaaatattttttagggtattatttaggagaatttttttaatttattaagataggttaatatttaaatttaggaaatatagagaatgttataaagatatttttcgagaagagtaattttaagatatgtaattgttagatttattaaagttgaaatgaaggaaaaaatgttaagggtagttagagagaaaggtcgggttatttataaagggaagtttattagattaatagcggatttttttgtagaaattttataagttagaagaaagtggaggttaatatttaatatttttaaagaatttttaatttagaattttatatttagttaaattaagttttataagcgaaggagaaataaaattttttgtagataggtaaatgttgagagattttgttattattaggtttgttttataagagtttttgaaggaagtattaaatatggaaaggaaaatttagtattagttatcgtaaaaaaatattaaattgtaaagattatcgattttgtgaagaaattttattaattaatgggtaaaataattagttagtattataatgataggattaaatttatatataaaaatattaatcgtaaatgtaaacgggttaaatgttttaattaaaggatataaatttgtaaatttaataaaaagttaagatttattagtgtgttgtaaggagatttattttacgtgtaaagatagatataggtttaaaataaatggatggaggaatatttattaagtaaatggaaagaaaaaaaaaagtaggggttgtaatgttagtttttgatgaaatagattttaaattaataaagattaaaaaagataaagaagggtattatataatggtaaagggatgaatataataagaagagtttattattttaaatatatatgtatttaatataggagtatttagatttataaagtaagtttttagaggtttataaagagatttagattttcgtataataatagtgggatattttaatattttattgttatatgagatagattaacgagatagaaaattaataaggatatttaggatttgaatttagttttggattaagtggatttaatagatatttatagaattttttattttaaattaatagaatatatattttttttagaattatattatatttttgttaaaattgattatataattggaagtaaaatattttttagtaaatgtaaaagaacggaaattataatagttttttagattatagtgtaattaaattagaatttaggattaagaaatttatttaaaattgtataattatatggaaattgaataatttgtttttgaatgattattgggtaaataatgaaatgaaggtagaaataaagaagttatttgaaattaatgagaataaagatataacgtattagaatttttgggatatagcgaaaatagtatttagagggaaatttatagtattaaatgtttataagagaaagtaggaaagatttaaattgatattttaatattataattaaaagaattagagaagtaagagtaaatatatttaaaagttagtagaaaataagaaataattaagattagagtagaattgaaggagatagagatataaaaaattttttaaaaaaattaatgaatttaggagttggtttttggaaaagattaataaaatagatagatcgttagttagattaataaagaagaaaagagagaagaattaaatagatataataaaaaatgataaagaatattattattgattttatagaaatataagttattattagagaatattataaatatttttatataaataaattagaaaatttagaagaaatggataaatttttggatatatatatttttttatatttttttaagattaaattaggaagaagttgaatttttgaatagattaataataagttttgaaattgaggtagtaattaatagtttattaattaaaaaaagtttaggattagatagatttatagtcgaattttattagaggtataaagagaagttggtattattttttttgaaattattttaaataatagaaaaagagggatttttttttaatttattttatgaggttagtattattttgatattaaaatttggtagagatataataaaaaaagaaaattttaggttaattttttgatgaatattaatgcgaaaatttttaataaagtattggtaagttaaatttagtaatatattaaaaagtttatttattataattaagtcggttttatttttgggatgtaaggttggtttaatatatgttagttaataaatgtaattcgttatataaatagaattaatgataaaaattatatgattattttaatagatgtagaaaaggttttcgataaaatgtaatatttttttatgttaaaaatttttaataaattaggtattgatggaacgtattttaaaataataagagttatttatgataaatttatagtaaatattatattaaatgggtaaaaattggaagtattttttttgaaaattggtataagttaaagatgtttttttttattatttttgtttaatatagtatcggaaattttggttagggtaattaggtaagataaagaaataaagtatatttaaataggaagataggaagttaaattgtttttgtttatagatgatatgattgtatatttagaaaattttattgttttagtttaaaatttttttaagttgataagtagttttagtaaagttttaggatataaaattaatgtgtaaaaattataagtatttttatatattaataatagataaatagagagttaaattatgagtgaatttttatttataattgttataaagagaataaaatatttaggaatataatttataaaggatgtgaaggatttttttaaggagaattataaattattgtttagggaaataagagaggatataaataaatggaaaaatattttatgtttacggataggaagaatagatattatgaaaatggttatattgtttaaagtaatttatagatttagtgttatttttattaagttattattgattttttttatagaattagaaaaaattattttgaattttatatggaattaaaaaaaagtttatatagttaagataattttaagtaaaaagaataaaggtggagatatcgtattatttgattttaaattatatattataaggttataggaattaaaatagtatggtattggtattaaaatagagatataggttaatggaatagaatagaggttttagaaataacgttatttatttataattatttgatttttgataaatttgataaaaataagtaatgggaaaaggattttttatttaataaattgtgttgggaaaattgttagttatatgtagaaaattgaattaggattttttttttatattttatataaaaattaatttaagatgtattaaagatttaaatgtaagatttaaaattataaaaattttggaagaaaatttaggtagtattatttaggatataggtatggataaagattttatgattaaaatattaaaagtaatggtaataaaagttaaaattgataaatgggatttaattaaattaaagaatttttgtatagtaaaagaaattattattagagtgaacgggtaatttatagaatgggagaaaatttttgtaatttatttatttgataaagggttaatatttagaatttataaggaatttaaaataaatttacgagaaaaaaataattttattaaaaagtgggtaaaggataagaatagatattttttaaaagaagatatttatgtagttaataaatatatgaaaataagtttattattattggttattagagaaatgtaaattaaaattataatgagatattattttacgttagttagaattggcgattattaaaaagttaggaaataatagatgtcgaagaggatgtggagaaataggaacgtttttattttgttggtgggagtgtaaattattttaattattgtggaagatagtgtggagattttttaaggatttagaattagaaatattatttgatttagtaattttattattgggtatataaggattataaattattttgttatataaagatatatgtatatatgtatgtttattgtagtattatttataatagtaaagatttggaattaatttaaatgtttataaatgatagattggataaagaaaatgtggtatatatatattatggaatgttatgtagttataaaaaaggttaagtttatgttttttgtagggacgtggatgaagtcggaagtcgttatttttagtaattaatataggaatagaaaattaaatattatatgtttttatttataagtgggagtcgaataatgcgaatatatggatttagggaggggaatattatatatcggggtttgttagggggttgggggattaggaaagggatattattagtagaaatatttaatgtagatgataggttgatgggtgtaggaaattattatggtacgtgtatatttggttaataaatttgtatattttgtatatgtattttagaatttaaaatataaaaaaaaaaaaaaaatttttagatatatatttattataaagatattattttataggtaaagaaaaaaggaaaaagtattatagtttataaatgtgaataaagatggatagtatttgatgaatataataaaattttgtaaattgttgaaatagtatgtattttttgtttgtttgtttttttaattgagttttttgtttggaaatattaaaattatttattaggatgggtagagataatagttttagtatttgttttttttttttttttttagtttttaaataatgattttatttttttagttttggttttaaggaggggaaaatttaaaatttgttgtttggattttttattttatttgtacggttattgttttgttttagagggttttgttataaagagggagagacgtttaatttattatttacggaggaataagatagtgttattcgaagtagatatataaggtggttttcgtgtagttttaaaaaatgtatgttttgaaaaatggggttgattttttagatttatggtaattttaattttttttatagatgtattatttttttatcgtaggtaatttataaatttattagataattgatagttgattatattttttgtttaatattaaaattttttattttgttttaaatgtaagtttttgatttttttatgattttgtttagtgtatgtatttaaatttattttattattagtttttagagaaatattgtttagtatttttaagaaataaaaaaggtaaatgttttataatatattttttgaaaatttaggatgttaataagtattttgtgtatatacgtatagtatatattaatgtagtaaaagtaattggtatgaaaaattagaaggaaatttattttttttattttttgtataatgtattttttagtgtatttatttagtttttaaggaattaaaataaattatgattttattttttttacgtatgtagattaaaaataatagaagttgttagattttttagtaagtatttttaggagaaaataaagaaattaaataaagatttttagaaatttttatgtagaggggattaaagtaaagtcgtatgagtagagagatgtagacgttggaatagaaggtagtgtttagtgaaggatttatatatgtttgattttgtttttgttttttgttaggtgggagcggattttttagaagtaggaagaggtgaggggttgggataaagtattaagggaaattagttatggggttatgtaaatatttaagatattgaaaaggaattagtttataatggtattagtttaggattattgttattgtttttttttttatatatataaattgtttaagagtttggttgtttgttaagtattattttatgaatttaaatagttatgatataaagatatattattgtttataggggtttatggtttgagttatcgagataatatggtttagatttaaagtatagtaggtaataaagagtattattttaggattaaaggttttttattttggtgaattttattttttaggagaaggatatatttaaaaattttatggaaaatgtattttataagaatatggagtttattaagtataatttatgagagtagaaggaagtaaaagtattaaaatatttgagtagtgtttgaagaaagataataaagagggaggagacgttgggtgataggttggggtaatgtattttaatttattaaaaataaatagaaaattatttttttttatttagaacggttattattaagaaaataacgataagtgttgatgaggatatagagaaattagaattttcgtgtattgttggtaggaatgtaaaatggcgtagttgttacgaaaaatagtatggtggtttttgaaaaaattaaatatagaattattattgatttagtaattttatttttaggtatatatttaaaagaattaaaagtagggttttaaagagatatttgtatatttaattttatagtagcgtaatagttaaaagtgagaataatttaaatatttattagtggagaaaaggatatacgaagtgtggtatatgtatatattggaatattatttagttttaaaaaggaatgtaattttgatatatataggaataaattttgaaaatattatgttaagtgaaattagataaaatgcggaaggatagatattttttgattttatatagatgaggtatttataatagttaaatttatagaggtaaattaatttatgaggggagatagtaatggaatgttattgtttaatgggtagagtttttgtttgggataacgggaaagttttggggatggatggcggtaatggttaaataatgttaatgtaattaatgttattgaattatatgtaaaagtggttaagatggttataattttatttatatttattataattaaaaaattaataatatataaatgataaatttatagtggttttagttttggttggtttagtagaggtggggtttggagaatatgttgtatttttgttttgttgtttttttagggtttttttagaatagggttgtatatattgttagttgtttatttagtagttttaagttttttattttttttttgttaagagttttgtttaggaattttaaggttatatgttttagggagattgggatattcgttagtgttaggggtgaattttgatttatatagagtaggtaattttaaatgttttgtttttagggtttatttatattttttaatgttattgaagattttaaagagttttatttatatatatatgtgtgtgtgtgtgtatgtatgtgtatatatatatatatttatatatatatagatatagatagatagatagatagatagatatttattattagaaattaaaattgagaataattaaaaagataaaatatataaatatatattttattagttgttagagagaggttattattatttattatgtaattttttgataacgttatcgtatattagtgagcgaatgcgagtcgaaaaggtaaatagtagtttagtattattataaaaatagttttatttttgtgaattttttaaaagggtttcggggattttgggtttttagttatattttgggaatggttagtatagattagttatggtatttatttttgttcgtttattaaattgtaggaataggtatattatggaaatatagggtatgagaattgaattttaataaaaggttttttagttttttttagttttaaatgagtttatttttttttatatttgatatagtagtttttgtgtgatatttagaacggtaatagttattttgagatttagggataaggaaatttgaggggattggttaatatattgtaaatagtaaagaagaattatagtttcgtgtttttatagtatagttgaggtaatgaaggagttaaatgtggaattgttttttttgtttaattttttaatattattttttggtttttttgttatttgtaattaaatatattttagttgatatattttaggatttagtttgttgagtatattttgaaatttataaatttatataatatttggtatattgtaggagtatgataaatatgtattgaataaatgtatggaaaataaatatataaaaaaagtaataaggttgttgtagaagaaaaataaaatagataaaattttgattgattttatgttgatagaaatttttgtagttttaagattgttaatatttaaaataaagtttattttaaattatataaaagtagttatatatggtatttgttagggggataagaaagtttaagaatgtttttttttggtttaaaatatttttaagtttagagagttaagtttatttatgttaaatatggattatataagttttttaaagtggaggcgatttgataaagtgtattttttttttatttatttttagtatgaggtttttttttttatgaaataagtattaaataggagatgtatggagagaatgttataaaatatattaattatggaaaaagaaaaaaaagataaattaaatatttagtttttaattaattaatgttattaattaggggtattatgattttgttagaaaatatttaaaattttttaaaatataattaaatataaaattaagaaatttatgtttaattttatttaagttgataagatttttttttttttttgatgaaagtttgataattatttttaatttgttgaaatgtaatgtttttttgttttattttatagggtaagattggttaatttatttttgtgtttgtggttttttttttttttttgaaagttataataaaagatttttgtttttattaagtgtttatgaaagaaataaatggtatttttttttttaaaattaatgaggttttaagaaaagttttattaggaggagttggttatttttttgttgagttagtggcgttttatttttgagatagtttaattaaaaatatagatttgaaatttgtagataattttaaataaattttaattgtaaataaaatttgggtttaaggaattggaggaggtaattttaatttaggtgtagagtatgtatatatattttttagatgattttgtaaagaattaaggaaattgaatttagtagataattttggggatttattaggtttaatttttttatttaagattttagtaatggggggagaggagttattttttggatttggttttaaaataaaagtatttttttattatagcgtttgttatcgaggttgttaagatagaaatttttgattttgttttttattagagtattaaggagttattattcggatttgaaaaatattagtttttttttatgtattttattataattattattttttttttttgcgttttttgtttttattttatttatttgatagtaagatttgggttttggttagattagttagaaagtgagttgaggaatatattagttattaaaatattaggaagtttttttttgttttgtgatttggttttaagttatttttgtttttttttttttttgattttataggtaatttattattatttaaataaaaataaggaaatttatatatttattaggagtttattttatgataagagttttgaaaattattgtaaataaaaagatgatagtgttttttatttttaagtaatttatggttaatgaggaaattgggatttatatatagattatattgtgggaagggttgggagagaaggaaatatagggggttgtaggtagtatgaggaaggggtattagttcggtatggaggtgttagagtttttagagagaaacgattttgagttaagtaggttaggaagtatgagtaggagtgagttaaagatattaaaattaaatgtaaggtgtttgttgtaattaatagtaagagttaaattattatttgatttatggtttttaaatttaaaaattgttgagagtttttagtattatttaaagttattttttttattagttaaatattaataaatataaattagtaaaatttttatgtttgtaatttttatataattataatataaaaaatatataaattaaatattaataaatttataaaatgagtaaaatttaaattgataaaattaatttagcgtgattaatgatgtagttattgaaatttattttggattaattatgtagggtttggtatcgataggtaggttttgttgattggttaatattaatatatgtagggagatagtttaatttacgtattatttttttttttagaattattgtgtaacggtaattttttagtttaaatacgttatttatatttttatttttgtttttttataatatttttttatatttaaagtagtgttttttggtattaatataaatataattttaggtattgaaattttaagatattatttagttagaattgtaggtatttaggtgtgtggaattatgaatttttaaaaaattattattaaaatgaaaaatagaaggtgaaatttttgtagagaattatagtattttaataaattttatttgtttaattttatttattttttggggtttgtaagttttagacggagtttaagtaattatatgttatgggttattgagtttatataggaagcgtttttgtggttagtttttagtattatgtaaaattaagtattttttttttttttaaattttttgtttatgtgatttttagttaagatggtacggtaaatttatttttggatggattttttttattttaaatatatagtaatgagaggggaaatataaaaagaaaaaaggaaaaggatataggtaagtatatatataaaataaatatttttatgaaatcgatacgagatagaaatataaagaggtaagatttcgaggataaaattatgagtagttagttttttttatgttagggtttaaaaataggtaatgaaattgtaggtttgggttttagaagggttgggggttaaatagaggtataaacgatagagtgagaaattagtatttttgttggaaggtgggatggaaggtgttgattagagttttatttttttatgtttgaaggaaggttcgtagtatttttgttttttatggagtggcggtttagggaggatggaggatatttgttaggtaggattaggtattgcgtgaagtagttatgaatgtttaggtaattaagtttttattgtgaaagttagttttgtatttaggttttatggaagttagatagagataagtagaatgaggttatataggggagagtgtgtagagagggagaaagaggcgaaaaatgattgaatgagtgaaaagtttttaaaattttatttaaaatatgttatttaattaaagttttaaagtatatgaagaaataaatgtaattaataatattagatattagattataaatttattttagatgaagttaattagtttaataaataggtatatttagatgttaaaaaattttaataaagtatatttaagatattaaaataattttaataaaatatatttaaggtgatttttaaaattaataaaaattagtatatttagggtgttttttaaaaaagttaattaaaaaataagaaagtataaattgaaaaggtagaattaaaagatggttaaaaaaaaattaattgtaaagtatgtaaattaggattacggttattaaaatttaaaaatttagtgtataagatattagatagtagattggagaggaagtattttgttttgataaaatatattgtatattattggatttgtagtagtatagtttaggagtttagttgttggttttatagtttggttttattcggatttggttggtagtttttcgatattataggtgattgaatgggttagattagtatatttaggttgtgagttttattagtattttgttttttttttattagttggtggatataggtgaagtaattttcgttttatataatttttatagaaatttgatgaaaaagtagattttgaaatgttttaggtaatagatttgttttttttgtaatagataatttattttggatttaaatttattttttttgtttattatatttttttagtattattaaatgtggatttgattggattttttatttattattatggtattataattaatttcggattaaggaatttattatatagtaaaaggagtaaagtaatgggtttttgttaaaagggtttgttgttagttaagttattattagttgttgtatgaattcgatggtttttatttgtatttttttattatttttaaatttttttattatatatttatttttttttgttgtattttttttgaagtttaaataggaaataaatattaatataaaggaaaatataaataagaatgatattttgagttatgtggaaaggaattttgatttgaggaattatagatgaataataatataaaaaattttggaaaattggtaataatatatatcgtaattgtttggataaatagttatattttttttttttttaaaaggttagaaaattttttatttaggtttttttggaaagtagagtttagataggttagagaaggtaaagattttaatttatttttttatttttaaagatagaaagttttttattagattagttatgtgatgttttttaggtgtgtgtttggtagttatgaaaggggattgataggatataggttttggaattagtcgttgtgtttttagaatttttttaaagtcgatgttatgttatagtataagagtattatttattgagttttaagggataatttagtttatttattgaaaaatggtttagtaaaatatgattgtggagggatgaattttatattattttaatttagttggttgtgttttttttttttaaaattagaatttttgttaagatttttgaaaaagaagtagtatgtttttttatttttttatttttattttaattattatagtaaaatgaatgtttttttttattaagttttggttattttaatgaatattgttatttttagatttttttttttttatttgttttttaaagggtagagaaaatttttaggggagtagtagttttaaagggtttgggaaggatgtatgtaaagttagttattcggttaaattttaaattttatgaggtatagtgttgtgatgggggaattgtttttataaattcgttgaaagatgattataatagtttttttttttttgaggagtttaagatgagtatagaggttttaaattagtaaagttggagattagatgatttattaataaaattgaatatagaagaaaatacgtaggtgtaaggaaagatgatttatgggataagtaatattggggagagttgattgtttttgttgtgttgtgtattaaatatatagaatataattgaaggtaaagagcgggttttttttggagttttttatgttttatatgaagtttttaggtattgtttagtatagtttaagtgatatagatttattcgaataatttatatatattttagtttggttattacgtagttttgttatgttttattggtttgagagggatattttgggaattattattgtaggggtgggttgtttttatatatttgtgggtgtttttcgtaaggtgggacgagagatttggaaaagaaaaagatatagagataaagtatagagaaagaaataaggggattcggggaattagcgtttagtatatggaggatttcgttagtttttgagtttttttagtatttattgattatttgtttttaagtatttgtttaataaagtatattttgtatcgtttttaatttattttattttgagttgatatagtatatgttttagagagtacggggttgggggtaaggttatagattaatagaattttaaggtagaagaattttttttagtatataataaaatggagttttttatgtttatttttttttatatagatatagtaataatttgatttttttcgtttttttttataattatatgttagttttttttatgttttagttatgattaaaaagttgtagtttttgtttatgttaatatttgtattagtattagtttttttatttagtatcggttagggattcgtcgtagcgagagtatttgtaggttaatacgagaggggagtttgtataaagtaattattcggagaaacggtaagtattttagagattagttattcgagaattgtgagagtgtatatttattattttggaaattataaaaattttaaaatagtaaatgtgtttatattttgttttaattattttatagaaaaataagatattttagaaaaattttaattttgattttttagtgtataaattgttgtgttaaatgtgtagtttatattttattaatgtcgtatggtaaggtaaggagtaggtagtagtcgtagggaggataaatttaattgagtatgaaaatttttagaaagggatttgttgaaaaagaatgaggtgatatatggataaattttaagataaagggtaatttaggtatttaatatatttaatataggtaaagtagaaaaaatttaatttggggatttagaggtttattggatttttttaaaatataatattgagatttagttgattaatataaaatgttataatgttagaatatattaataggggtttagtaaaaattttataattttgttcgatttggtttatttgtggattttattagaatgttaggtgtagtggagaggagtagttatttttttagtatttattttttattttttttttttttaacgagattggaaattttttagttagtatatttgagtgggataagaatgggttttgattaggttaaagtagtgtttattaattaaggatagtcgtgttttagaggggatttttgataatgtttgaagatatttttggttgttatagttgggagaaggatgttattggtatttagtgggtagaggttaggtatatcgttgaatatttattaagtataggatagttttttataataaagaattagtagtttaaatgtcggtattttatttttatattagtatatgggatttgtgaatattattttatatggtaaaggaatgattattattttgtataataataattattataaagtggtaatatttaggattttgagagaaggagtttgttttggaatattagggtagggtaggttatatgtaattttatgatagaggtagagtaagttggagatagatatagaggaggtagtaaagtgaagatagaagtaaagattggagggatgcggttataagtttaggaatgttatgttggtcgttagaagtgagaggaaggtgtttttagagggaatgtggttatgttagtttttatatttttggtttttagaattgtaataagatatgattttgtttttttgatttaataagtttgtagtaatttgttataatagtttcgggaaattaatatcgtattttgtaaggaggtgtatgaattgtaaattataaaaagggaagtaaagttatattttgtttttttttttgatttgaagatttttttttattaatatattaaaggtttttatattaggagttttttttattgttaaaatttttaatgaaaaatattattaagtatttttgttgttgaatgtacgttttaaaagtttattatttgatttattaattattttttaaagtatggtttttttttttttttattaattttattaagttttttttttttttttttttttttttttttttttgagatggagtttcgttttgtcgtttaggttggagtgtagtggcgcgattttggtttattgtaagtttaatttttcgggtttacgttatttttttgttttagttttttaagtagttgggattataggtattcgttattacgtttggttaaatttttttgtatttttagtagagatagggttttattatgttagttaggatggtttcgattttttgatttcgtgattcgtttgttttggttttttaaagttttgggattatagttataagttatcgcgttcggtttcgtttttttttttttattgaggtaataaagtattattttaatatattttatgtattaattatatttatttaattttggattatttattaataaaaagtttttattgtttaatgatatatttttttatttgtagaaagtatttggatattttaggttgggatggaatatattataatttttattattaaaatgaatataagttagtcggttgtagttgagaggttaagcgggtggattatttgaggttaggaattcgagtttagtttggttaatatagtgaaattttgttattattaaaaatagaaaaaattagttgggcgtggtgttatatgtttgtaattttagttattcgggaggttgtggcgagaattgtttgaattcgagacgtggaggttgtagtgagttgggagattacgttattgttttttaatttgggtaatagagtaagattttgttttaaaaaataaaattaaaataataataaaaaaattaatagaagtaattttttattttttagttttttatttattggtaggatttttagaattaatattattaagtgagggataggtatatttattttatttatagtaaatgtttgtgaagtagtttgatttttttatattttttatttatattttgttttgtgggagttattagttagaaatcggtgattagtataattttttattgttcggtaaaggtgtgggggtaggggtatagagagatgaagaattttatagagattatttatttcgttagaattttaataagaatagaatttatattttttggtatttagattaatattttatttgaggttatatgaaggaattaaggataaatgtgattaataaagaagtagaaaatagtagaatgttttttttttttgagaaaagatgaaatgacgtaggtattttttagtttcgacgagggaagggtggtgaacgagttattaaatgtttatcggtgaggaagatattgattgattgaagggtattttaatatgtagttattttgtattgattattaattttggttttttatttttttgtgtgttttataatttaaagagtttttaggattttaattatataagattttattgtattagattttgttggtattgtattttagttttagaatagaaatttatttaattagtataagttaaatgggggaagaggtgttatgaaaaggttatgattaaagattttatgaataatatttaaggaaagaaaaggtttagttggtttaaataggaagtggaattagaagtttttgttatattttagggtgtttatatttttgtttcgtttaagtatatttttttgtatattagttgtttttgttgtttttgttgtttgtggttttttttgtttttttagtttgtacgttttttatgttgtagtttagaaggtggttataattttatacgaaattttagtttaagaattaattattatttaattagtttagtattttaaggtttttatttttagggaagaggatgtgattggtttaatttagttaatagattttttagatagttttttacggggttagttgtttattttataaagattggtggttgatgagtattattgtttgggtagatattttaaaatagggtgtagtaaagaggaaatgattggtatatgtatagaggaatttaagagtgatatagtttttttagttaaggttatttagaaagattgtattattttagaatttgtgatttttggatgaagtggttataatttgtaaatagagagtaggaattattttttaatttttttattatattttaagttttgagatatatgtgtagaacgtgtagatttgttatataggtatatatacgttatggtggtttgttgtatcgattaattcgttatttacgttaggtattttttttaatgatgtttttttttaaattttttattttttgatagattttggtgtgtgatgtttttttttttgtgtttatgtgtttttattgtttaatttttatttacgagtgagaatatgtggtgtttggttttttgtttttgtattagtttgttgagaatgatcgtttttagttttatttatgtttttgtaaaggatatgaatttatttttttttatggttatatagtattttatggtgtatatgtgttatattttttttatttagtttattattggatgggtatttgggttggttttaagtttttgttattgtgaatagtgttgtaataaatatatatttgtatgtgtttttatagtagaatgatttataattttttgggtatatatttagtaatgggattgttgggttaaatggtatttttggttttagattttttaggaatttttatattgttttttataatggttgaattaatttatatttttattaatagtgtaaaagtaaggaattatttttaaattttattttagttttagtgtttagaataaaattttattattttgggtttgtattgttagaaatttattatttgtttagaagtgtttttaaattagtagattattaaggaaattttaaaaaatgaaatggattgatatatagtatgggtattgatttgttattatttggggaagggaaaggaggaaagggataaggggaggatatttgtagtttttatataggtaggaattttttgaattatgtatgatataagtttagtataggattggaattagaattagttttttaagtaatttttaaaaataaaaataggttaggcgtggtggtttatgtttgtaattttagtattttgggattgtaaaggttgaggtaggaggattgtttgaatttaggagtttgatattagtttaggtaatatattaagattttgtttttataaaaaaaaaaaaaaaagaaaaataaattagttaggtatggttgtgtgtatttgtatttttagatatttaggaggttgtggtaggaggattatttgagtttaggaggtagatgttgtagtgagttatgattgtgttattatatttttgtttggataatagagtaagaatttattttaaaaaaataaataaataaaaaataaaataaaataaaaatagaaattttattcgggtaggggagagggaagagtgaataggtagaatacggaggatttgtagggttataaaattattttgtatgatattataatagcggatatatgtatatttgtttaaatttatagaatgtataatattaagagtaaattttaatgttaattatggattttaggtgataatgatgtattaatgtatgtttattaattttaataaatgtattattttggtgggggatgttgatagtagggggatgttatgtatgtgggggtatggggtatagaggaaatttttgtattttttgtttaattttgttgtgaatttaaaattgttttaaaaaatagtttattaaaattaacgataattataaattttggtggtaggaataggaggaagtgtagttaaatagaatttaaatttagttaggtggtgtatgtttgtaattttagttgtttaggaggttaaggtagaaggatggtttgagtttaggagtttaaatttagtttgggtaattttataagattttagtttttaaaaagaaaaaaaagaatgtaaatttattttatatattttgagtataaggattataaatagtaggagtagagagagaaggtaagagtggattttagttatatttggtaggagttataggatttatattttgtttaataaaattaattagttttttttgaattataattttattaaaattagatagttagatgtttggtttttttagatagtgagaaaagtttttgttttttgtattatgaggtattatttgtttttaagtttagtgtttgaattttttaattattaggaaattaaatataaaagttttttttgggtttttttttaatttaattattaggatgaatgaatttttaacgttaattaatagttttatatgggagattgttttttatatttaagatatgaagttttttagttgttgaatttgtttttaaatatgtttttattttgatttagtttgtagaatattttaatagtatttttggttttttgtattaatttaatgggttagtttttttttaatttttttttttaaataatagataatttttttttggttatagggagtttggtttttttttgttttttgtttattatatttttaagattatttatttaggggtagggtaattttaagtaatagtatgattatttttatgtatatttaatttaaggttttataaggtgttattatttattttttgttatattttaagaattatatttggtttggtaatatttagaaggttttattatattgatttgagtaggattttaagaacgataataataaaaattaaagaaagagtatgagtatttttgtttattaattgtggttaaagatttgaaatattttttacgagtttaaaaagtataattatcggtttattaattagtataaagttatagttagataggaggaaagagtttttgtattttattgtatagtaggttgattatagttaatttttttttcgtttgtttagagaatattcgtttatagtatatgaggttgtagcgtttattttgagataattttgttcgtttttattattattttcgtaagttttagtatattgaatttggaaataaaaaatattattttatttataatattttgtttttagtattggtatttttatttataaaatatagtaatttttaatcgttgaaaatattaaattttagaaaatgtagtatttttacgtatgatggtaatattgtttttgaatagttattagttaaagatttattttaatttaatttttttgaaatagatgattttgatgatttagataattttgatgttagttttgtttagaaataattttaaaaatagtttttatattttatttttatattgaaaatttgttagatttgttttagttttaaagagtatattaatgtaaaattaaatgagcgttgggtagtgagttgtatttttttttttaaatgggaaaagggttaaatataatgtatgtatattttaaaataattagaagtgaggattttgaaagtttttattataaagaaataatgttttagatgacggatatgttaattattttaatttgattagtatataatatatatatgtgttgaaatattatattgtattttataaatatgtatattacgtgttaattaaaaataaaataatttttaaaaagaaatatataaattttttaaatttattggtatttgggaatattaataaattttaaataagataaatgtaatgagatttataaataaaaatattgtagtgaaaatgttgaaagttaaggataaggagaaagttttaaaagtagaaatagaaaaatagtttattatttataagggaattttaataagattaataggtgattttttagtagaaataaaagattttagaaaaatatgggaaaatatatttaaagtgtttaaaagttgttaattaagaattttatattttttaaaattattttttaaaaatgaaggtgaaataaagatttttttagaagaataaaaattgaatttgttgttagaaaatttattttgtaaaaaaaagtgaattaatattagaaggtaatttgaatttatataataaaagaatattgataattatgtaattataaatgtatatttttttttttttatttttataattgatataaaaatgaattgtataaaatgatatgtatatattgtattgttgggtttataatatatagaaaggaataagatatgtaaatatatttgttaaatatagtgtaaatgagttaaatagttaagttgtattgggttaaggaagtaattatatatgttaaagtaataattaaaatattgttgaatttataatattgagaggtaatatgtataataataatgttataaaaaaaggaagagaagggaataaagttatgtagatgatttataatttatgaaggttagatttataattttttgattttataatgatatgaaagtgatatatagttagtagaagttatattttaaattttgaattttgttttttttttaggttattgatatgtgatattataattattgataaaataattagaaaaaagatcgagaaaatagaatatttgaataatattataattaagtagatttaatagatatttatagaattttttatttaataatagaatatatattttttttaagtatgttttttttataatgttgggtagtgatagtaagttatagtttttagttagtttagtaattataggggtaaataagtaatattttatagtgtacggtgttattaagtaatgatgtgtattatattaggtgtattaagtgaatttttgatttataatatttttaatttatgatgatataattttattataagtcgagaattatatgtataggatataagttaaaaattatatgtataggagtaatatttttatatattacggtaattattttacggtaaattttagagtagttattaaaaaaaaaaaatttaaaaagaatagtgaaaatattattaaagaaattaaaatgttatattatgaaatatttatttataggtattagttattatttatgtttgtaattttagtattttgagaggttaagatagaaggattatttgagtttaggagtttgagattggtttgggtaataaaaaatttttataaaaaaataaaaaaaattggttgggtatgttggtttatatttgtaattttagaattttgggaggtgaaggtaggtagattatttgaggttaagatttaagagattagtttggttaatatggtgaaatttttcgtttttattaaaaatataaaaattagttgggtatggtggtgtatgtttgtagttttaattatttaggaggttgaattatgagaatagtttgagttcgggagatagaggttgtagtgagtcgagtttatattattgtattttagtttgggtgatagattaatattttgttttaagaaaaaaaaagaaaaaaaaaattaaaaatagaaaaattagttaggtgtggtggtgtatgtttgtggttttagttttatgggtagtaaaggaaggagaattatttgagtttaggaggttaatagtggtagtgagttatgtttatgttattgtattttagtttgggtaagagagtgagattttgtttaaaaaaaaaaaaaatagataatatttatttaaaagagcgtaataaaaggagaaatagagttataaaaaaaagacgagatatatagaaaaagtaaaagtttagatataaagttaattatgttaataatattatggatgtgagtggaataaataattttattaggttggatacggtggtttatatttgtaattttagtattttgggaggttaaggtgggtggattatttgaggttaagagtttaagattagtttggttaatataatgaaacgttgtttttattaaaaatataaaaattagttggttgtggtggtaggtgtttgtaattttagttattcgggtgggtgaggtaggagaatcgtttgaatttgagaggcggaggttgtagtgagtagagatcgtgttattgtattttagtttgagtggtagattaagattttgttttaaaaaaaaaaaaaaaaaaaaaaaaatttttattaaaagataaagattgttagattttaagaaaatatgatttaattatatgttgtttatagaagatatattttagagtgaaaaatataaatagattggaagtaaaaggatagaaaagatatgttatgtaaatatataaaaataagaaatttaattgtggttatattgatattaaaaaaaataaattttaaaataaaaagttattagagatggagagggatattttgttaattataaaagggttaatttattaggaagatataattattataaatatatataattaaggattaaaatttatgaagtaaaaattgatagaaagggagaaatagataattgaatattaatcgttggagattttaaattgttatttttagtgatagataaaataattagaaagaagattaataagaaaatagaatatttgaataatattataaattaattagatttaatttatatttatagaattttttatttaatagtatatatattttttttaagattatatggaatattttaaatagattatatgttaggttataaaatgagtttttatatatttaaaagaatattagtaatataataaatgtgttttgatgataaaaaaagtaattaaaaataaatgtaggaagttttaaaggaaatttataaatgtggaaattgaataaggtattattaaataattagttggtttaaaggaggaaaaatatgttttgggataaagataagttgttagtaattgattttaaagagaggattatagaaaagttgtttgatagaaatttaaaatatttgttttaaggaaatttggttaattttaataaagtagagaaaaataatttagaaatttattagagaaatttaatagagagattgaaataattttttaaaattaaatagaaatttaggagttaaaaattataatgaataaaataaaaaatttaatagaaagtattaatagtagaattgtttaattagaggagtattagtgaatttaaagataggttaattgaaaatacgtaattaaaggtgaaaaaggaaaaaggaatgaagttataggatttatgagtaatatttaaagagtaaatatgtgggttattggtgtttaagggggaattttgaaaaagagaaagtagtagaaagtttattaaagaaataataatagaaagtattttaaatttggagaaagttatagttatttacgtataggaagattaagggtaattagttagatttaatttaaataatattattttataatatattataattaaaatgttaaagattaagtataaagagaggattttgaaagtagtaagagaaaagaagtaaataatttataagggagtattaatatgtttaataagagatttttaagtagaaatattgttttgaagaaatttaaagttttaaagaaaaaaaaattaaaattattaattaggaatattatatttattaaagttgtattttagaaatgaagaaaagaataaagatttttggacgataaaagttgatggaatttattagtattagatttgttttataagaaatgttaaagggagttttttaagatgaaagaaaaggatagtaatgagtaatataaaaatatttgaaagtatataatttattgataaaagtaagtatatagttaaattttgaagtttttaatattgtaatggtggtatgtatattatatatttttttaagaaggttaagataatataattaaaaataatagttacgataatttgttaggggatatgtaatataaaaagatataaattttgatattaaaagtttaaaatgggggagtggagttaaagagtatttttttttcgattaaagttgttattagtgtaaaataattttttataattataaggtatatttttataagttttatggtaattataaagtaaaagtttataatagatatattaaaaataaaaagtaaagaattaaaatatattattagagaaaattatttaattttaaaggaagaaagaaagaaaaaaagaatttataaaattagaaaaaaattaataaaatgatagtagtaaatttttatttattaataattattttgaatgtaaatggattaaattatttaattaaaagatatagagtagttaaatggatttaaaaaaaaagaaaataagatttaattatatattgtttataaaagatttgttttatttataaggatatatatagattgaaagtaaataaatggaaaaagatattttatataaatggaaattaaaataggagtggttatatttatattagataaaatagattttaagttatttgtaaatagagataaagaaggttattatattaatatatgataatggggttggttaatttagtaaaaggatatgttatatatttaggtgttttgatgttgggtaaatgtatatgtatttaatgttagagtatttaaatatataaagttaatattaatagattttaagaaatagatagattgtaatataatattagtagaagagtttaatattttatttttagtaatggatagattatttagatagaaagttaataaagaaatattagatatgaattgtattttagattaaatggatttaataaatatttatagaatattttatttaataggtatagaatatatattttttttaattgtatattaattattttttagtataaattatatgttaggttataaaataagttttttaaatttaagagtattaaaattttgttaagtattttttttgattataatggtataaaattagatattaataaaaggggaaattttgaaaattttataaatatatagaaattaaataatatgtttttaaataatgagttaatgaataaatttaaagagaaatttaaaaatattttgagataaatgaaaacggaaatataatatattaaattttatgggatagagtaaaaataattttaagagggaagtttatagtaataaatgttaatttttaaaaataatttaaagtttaaattttgagaatgatttattaaatgtaaatattttgagaaaggatattttttttattaaatattaattaatattttatgagaaatttgttttgttgttgttttgttttgaatagatggttttttttttgttgtttagattggtgtgtagtggtataattatagtttattatagttttaaattcgtgggtttaagggatttttttttttagtttttttaggggttgggattataggtgtatgttattatatttagttggatttgttgatagttagtaaaggttgttaggtattatattatatttggtaatgataaaaggtgaatgagataggtgttagtgataggtaaaatgagaagatgttaaagataaattttgtttagagttagtttgggttattttaaaatatttagtttgttatttttgtaatatttagttttttaagatggcgtataggattaataaggtagtttttgttatttattatagagtattgattaaataatttattattttgtggttgttattttgattttgaatttattttttaaagttttgttttaaatatttttttttttaaagattatttttttaatgaaaatataggtttattttaaatttgtataaatataaaagggtatattttatttattatgttttaattataatattatatgtaagtaaataatttattttataaaaaaataaaaatttaatgaatggtagtagtttaattattttaagttgttagtaggtataaagttaaatattttttaaaaatataaatagttatttatgatttatttgtgtttttttttttttatttaataaatgttagtataatagagtgattaagaaggttgatttggaggtagattgtcgaagtttgaatttttattttataatatattagttatgtgattttgggaagttattttgttagtttatgttttcgtttttgtatttgtaaaatgggaaaaatttagtagggttgttgtgaataataaaatatattaattatatagaaagtatttagaattgtgtttggtatattttaatatttatttaatgttagttattattattagttattgtatttttaagtagaaattaatgtttttttttaagagttttttattagttagaaataattttttttggtaagtttaaatatttgtcggtaaaattgtttataaaagtaatggagttaatagagagaataagtattaatgttttgaacgggttgtgtattatatagtttgaaagttttaaagttgtttattttattattttataaatattagagttagaggttttaagattttgttaagttagtttttattatatttataatatgttaatatgagatggataagatagtttggtcggttgttaagttatgagttgtataaatattagtacgtaataaaatgattgtaaaagttatgtggtttttattggttatattaaattatatttgaagatttttgtttttttagttgtaaataattgggaaaagagtgtatttgagagtaagatttaaatttaaataaattgtaaattttttaatattttggaaattttagtttagtttttttttatgtgtaagattaaatttagtatagtttataatttgaaatttaaatatattattagtatattgggttttaattttagttttgatttatatagtattattaatagtatggtttaaaatattttatttttttttaaatgaaaaatataatgatatgtattagttttattagataaaaaaagattaaatgagataaatattaataatagtagttgtaattgttaataaataatataggaaagtattatttatttgaattttaagattttttttttttatatatatatatatatatatatatatatatatatatatatataaatatacgtatgcgtatacgtatagagagagatacgtatatatatagaaaaaataaatttgagttaaggaataagggagaaagtataaaaaggaaataatttaatggtttttttaaatattgaaaaaaaaagattttgatatttagaagaatatgaagataaataaaacggtatgttgttaaagagaaggattgtgtaaaaaaattatagatatgtaataaataatataaaggaattgagaaagaaataatttattttttagttagaattaaaaatgaagtttttatgtaattaggagttttagggagaatataattatgatggaataaattttatttaatagatttggttgagataatattataaattattataatattataaattaaataaattaatatttaaaatagtaaattgaaaatagaatgttataaattatatggagttttatatttaatattagtatagtttatgtattttttgtatattataataaaaaagtaaaaataataatgttaataatagatgtgaataaataatatatatattaagaaatacggatttttttttttaataaatatttattaaatgttgattaaatgaaaaataatattataagttaaaaaagtagagtgaaattatttttgattataaaattagtgattaaaaaatattttatagattgtttgagtttaggaagttgaggttgtagtgagttatgattatattattgtattttagtttgggtaatagggtaagattttgttttgaaaaaaaaaaatttttagtattggtaagaatatagttaaatagttatttatatgtaggtttttggtaatgtaattggtttaagttttttgaaagataattagagaagtatattaaaaaattttgaatgtgtttatatttttttatttattaatttatttttaggaatttagtgtaaggaaataattagagatgtatatgattgatataaaaggatgtttattgtatatttatttataatagtaaaaaattgttaataatttatatttttaataataagtaatgaattatataatttgtaatatagttatatgaaggaatttaagttattagtttaattttagaaaaatatgatttaatggtacggaaaattgtttatgttagatttaaatgtaagattataaaaagttatatataatatgattgtaatttttttttatatatataaatatatatatatataattaaaaattggaaagtaaatattataatgttaataatagttttttttgtgtaatgttagattattttattgtattttttattaatttataaattttttataataattatgtattatttttgtaattagtgtagtgatttttgtggttaaatataaattgttttttttaagttaattagggaaattttatttttttgttagtgattgtattttaggttaatacgtggagatgtttggtgtaggggtttttaggaaagatttttttgttttttataggaaaaataagagaagaattgtttttttttgaatattgttatgatcggtatgatttatttattatttaattatttatttaaaaatatttattatgtagtaggtattgtggttaatgaaaagatgtaatttttaatttttgaaatattttatagtagattggaaaatatataattgagtggggtagtagatatgtaaataaaaattttaataataatgtgaaattgatttaatggtagtatatatatataacgtgggggtataaagattttataaattagaagagtttcgagggttgattattgtttaagtaaagaaaaggggagtattattagatttagtgtttagttatagtatttttttggtacgtgtaaaggtttagagtttagtgaggtatggtggcgggtatttgtagtattttttataatttaatttttaaaaggtaatatgaatatatttttataaattattttaaatattaaataatttgtttttgaattttgtattttatttatatataaatatattaattatattaaggttattagaggaagtaaatagttttttttttaagggaattttttaatttattaaaataataattattattattttatagtagttattatttatatggtgtttattttatgttaaggataattataagtatcgtaaatttattttagtttttataattttattatataggtgtggaaattaaggaaaagagaagtaaatattttgtttaaatattttgtttaaggttatatattatgtacgagatggagttatttattaagaaatatattatgtgtttatttatatggtatgttagttttttattgttttttgttgtttttatttataaaagttagttttttgttgtttttatttatattaaaagtaaaaatttttaataattttaatttaaatttaaggaggaattattattttttttaagtatgtgtattttttatttatgtttatattggttaattttttttttaagtttttttatttaatattatttatattagtagtttttttttaagatttttagtggatttttttagttgttagaggtaatgtttttgtttgttgtttatatttatatatttaaagtttatttatttaaatttttgtggggaaattatagataatgtttgtttttgttaaaggataaagggagaaaaatgttttttatagagttaaaagaattttatttgttaaattaatttgatgatgttggatgaattgaatatttttatttgattattttattatttgttatttaatatgaaattatataattttttaagtggaaattatttaaattgttttttaaggaattaaattagaaaatttttttttttgtgtataataaaaaggtaggtatgttttagataggagttgtatagagtagtatttttgtaatttttttttttgaataaaattgtatttttgttttgttgtataaaaatttaagatatatatttaagataaggaatttggtatggatttttttttattattgttatatggtagtaaaattagtttttttagttgataaggaatttttgtttttttaaattgaatttataatttattttaagatttttgaaattttatttattagtaatagatttatgattttagttttttataatttttgtatagaataagtatttttgatattaaaataaaatgttataatttaattttaatattaataagtggaataattattttttttatttaaaaatatttttgttttttttaaaatataggttgttttagtaataataatttgtaaagtaggattttatttataattttattatttaagtcgattatgtttgttttatataatatgatgtttttattaagattatatataggagaaaattaaatttggtttggttagtataataattatttgttatagtagattttaagagttatatatgttaagggattttttttatttgtttagttatttgaaaatcgttaggttattttttgaataggttttgattgtgatttaattttagtatgtattgatgtaaattttattgataagttatattttaatataagtgtttatggttttgtgttttatatggatttatatggatttttttttatttgtttttataggttaattgagttttagtatttggtttatgtatttagtatgttttattttggtttttgacgttttggttattaagtttttgttaggggaaattttttatgtttttttattttgattagtttgttgataatttgaatttagtgtttttatttgattatatatagggtattttatttttttttttttttaatttttaatgatttttttttttgtttattgttttttgttttttttaagagttttattttagattaggtttggtagtgtaagcgtgtaattttagtatttagggaggttgagatgggaggattattttagtttaggagttttgagattagtttagttaatagtgagattttatttttataaaaaaatagataaataaaaattagttaggtgtggtgatatatattagtagttttagttgtttgggaggttgaggagggagggttgtttgagtttatgagtttgaggttgtaatgagttacggattatgttattgtattttagtttagataaaagagtaagattttgtttttagaaataatgataataagaagagtattattttaatttattatttttatattttattattttgttttttatagttttttagagttattatataaggtttagatttaaaaatttttttttgaatttttaaaatatttgattaggtaattaatgtttagaagtatatataattttaataaatagtattatttgtttgttttttgttagtaatagtatatataaattaataggtatgatttttatataattacggagtatttgtataattagtggttggagtaagaattgaaaaattatataattgaattttgaagtgcgcgtgagtatagtatatagaaattatattataaaaaggtagttattttttatatttgtattttacggggggataataattttatgtgttattatttataggtttatgattgagttaaaattttaaatgatttttttttataaaattaatataaatttaaagtatattaatatattttttattgtttatttaaatttttaaaaatttgttttagtttttaattataattgtatgatattttattgattgattgagatagggttttgttttgttatttaggttggagtatagtggtgttattatggtttattatagttttgatttttaaggtttaaaggatttttttattttagttttttaaatggttgagattataggtatatgttattatgtttgattaatttgatattatttttattttttgtggagatagggttttgttatgttgtttaggttggttttaaatttttgggtttaagtgatttttttgttttagttttttaaagtgttgggattatagatatgatttattgtgtttagttatacgttttagaatagaaattagatatgtttgaggtttatattttttgaaagattgattttagaaaattggtttttatgttatttaattttgtagtaaattttaaaaaacgtttggtaattgttgtgaattagttaattttattttttgagtaggtatatatgttattgggttttagaagagtaatgtttaagtagtggaagggtaattgattaaaattatataaaattttattagaagtgataagggagttttttttgttatgtaaatttattttttggggaattttgggggatttgagaaataatatttttgtttgggattatatatgttttattttgatttatagatttttaagttttttgttattagggaaattgaggattttttaagtataattaatgatatttttttgttagtaatattattattttattgtgattaatacgaatattaatttttagatcgaagaagttttattatttttaagaaggagattttgaaaaagggatttgagtagagtagtttatttggataataaagggaatattattaagaaagtagagaagtgatatagggaattatagttaatgaaaggagggttattaagttaattattagagtgggtaggtaattagagtttagtttaataagatttttggaaaatgggataaaatatatttttttgaagtaaaatatatagtaaaattgtagaaattaaaggtaaagaggaagttttaaaagtagatagagattataaaaagataaattgtttttaagggaatattgttaagaataggaggtaaagatataaaaagaaaattataagttaatatttttgataaatttagatgtagaagtttttatttaatataatattagtaaatagaatttaataatatataaaaaaagattatatattatgattaaatgaaatttatttttgggttgtaaggatgatttaatatacgttaatttatgaagatgatatattatattaatagaattaagaataaaaattatatgattattttaatagatgtagaaagagtatttgataaaattcgatattttttatgataaaaaaaattgttaataaattaggtatagaaggaatgtatattaatataaggttatttgtgatagatttataattaattatatcgattggggaaaagttaaaagtattttttttaaaattaggaataatataacgaggtttatttttattatttttatttaatatagtattggaaattttatttagagtaattaggtaagagaaagaaagaaagggtatttaaattggaaaggaggaagttaaattgtttatgtttatagatgatatagtatatagaaaattttataaattttattaaaaaaaaattattagaattaataaatgaatttagttaagttgtaggatataaaattaataaataaaaattattagtgtttttatatattaaatattaatagtaaattatttgaaaaataaattaagaaagtaattttatttataatatttgttaaaaaaaaagaaataaaatatttaggtataaatttaattaaggatgtgaaagatttttataatgaaaattataaaatattgaaaaaaattgaagatatataaaaaatgggaagatattttatgtttatagattggaagaattcgtattttttaaaagttcgttaaaatttgtatggaggttgggtatagtgatttatgtttgtaattttagtattttgggaggtcgaggtaggtggattatttgaggttaggagtgcgagattattttggttaatatggcgaaattttatttttattaaaaatataaaaattagttgaggatagtggtaggtatttgtagtttcggttattcgggaggttgaggtaggaggattttttgaatttaggaggtggaggatgtagtgagttaagatcgcgttattttattttagtttaggtgagagagtgagattttgttttaaaaaaaaaaaaaaaaaaaaatatatatatatatatatatatatattaagattttaaagagttaaagtaattttgcgttaaaaaaataaagttagaggtattaattttatttgattttaaaatatattataaagttatagtaagtaaaatagtagagtattgatataaaaatatatagataaatggaatagaaaagagaatatatttatagttaattgatttttgataaaggcgttaagaatatatattggggaaaggatagtttttttaatgaatggtgtttaggaaaattggatatttatatgtagaaaaacggaggtagattttattttttattatttagaaaaattaatataattgcgagttgggtttggtcgttttgcgggagttatggcggtttcggaggcggtggcggcggcggggtttacggttttggcggcgggtgttcgcgtcgtttcggcggttacgagaggagttttcgtcgtcgtttcgggttcgtgggtgttttcgggatttcgattgaggggtagtcggtcgcggttcgcgggggtgacgtagtagttcgcggttttcgtgttggcgggggagttgatttagtagtaggtgagcgagttgttttagattatatggtttaatattttgtgtatcgtgcgcggttgtcgtaagattttgtttaatagtttcgcgtttaatatgtatttggttaagagttatcgtatgtagtatagtatagttaatttaataataagaaaagatttgaaaattgtatcgaaattttattgttgtttaatcgaaggttgttttagaggttttgatagattatttttttagttttttttcgtaaaatagtattttatgaaaatttatgttgagaagaagtataaatgtagtaagtgtagtaattcgtacggtatagaatgggatttgaaaagatttgtagaggattgtggtaagatttttcggtgtatatgcggttgtttttacgttagtagaaaagtattgtagttttatatttatcgaattggttacgagatttttgtagaatatagggatttatttagtaagaaaaggaaaatggaaaattgtgtaaaattagaagttatttaataagattattgaattatttaataattaattaatttttagattagatatttaagaattagaagttttagaaataaagttagaattattttttgaagatttttgtggttttaatattgataagtagatttttttttataatattatcgagatagttttaaaagttgtttttattaaagtttaaagtggttttgtttaaattattcgtgatgtagtttttttttatgtttgtttttgtgtttatagtcgattttttagtttagtttgtggtgttaggtgttgattagggttttgttataggggttgtgtatttattgtttgtttttgttagtaggaattttgattttcggtttagatttagaggtttgtttttttaaagagagtttattttttttttaaattgttgattttgttgttgttgagttaataagtattggtgtttaagtgaatttgggtaaaagtttatttaatattttataagaattagggaatatatgttagaagaacggtatttttttaattaacgtgtagatagatttgttttatgttttataaaattttatattttttgtatagtgggttatcgttgatttttttgtgtcgttttgtttttaaattgatttgttgtttgatttttaagtgtttttttttattagtgtttatatttagatatttttgtttagttttaaggtaattttatttatagttgtttagattgatgtatttatggatatttgtttttagtcgggtggggttttttgagaaatttaaattagtgggatataaagtttaacggatgattatgtatagatggattaagttggaatgtgtagagatatttttgagtgtttatttattatataatgttgttataagtaatattataagtaatagtttagtagtagagatagtaatttatagtttgttattttagaatgagtttaagattttaaattaagagattgagaaatgtgtattaattataaattttagtgtatagaatagtatgttttttttatagaatatgatagataattagatttaaattatagatttattaagtgatttggaaaatattttgttaagtaatttgtttgtttagatattggattattatagttttttgtttaatataaattttggatttgatatttagtttttatttggtttagtttagaattttggaattaattttgatattgaagagtttttttcggttttatatatttagatttaaattgaagagagtgaatttagtattatgaatattgagttagttttggagttattggatatagagatttaaacggattttttattcgtagatatttttgtttagttttatgggtgtaggggaaattttaattttttaggttttgagatgtttgatagataaatatagatagatttaaatttttttttagatagtagtttttatttgtttttgggaagtattttgaaatattttagtttttttatgagtattgatttatttgatatagagatataaattgaaggaatttttattgttaaagatatatttgttttagaaagtaaagtttagttgaatagtatagaaatatagattatgagttttgggtttgaaattttggggagtttgttttttattaataacgaaatttaaataataatggacgatttttttttggttgatatggtttggaatatgatggagttttagtttagttttgtagaaatttagatttttgcggaattatatatagtttttaatttttaaaattaatagtggagtttatgtgtgagacggtatttattattttttttggattaaaattacggacgggggataatagtattaattcgattgaatgtggttgatgatgtagttgtttagtttttttgtagttttttgttttttgtatttgtaaatagaaatttgtgtataaatgtgagtgtattataaagtttgagatgttgatttaaaaaaaaagaaaaattaatataaaatgggttaaatgtaatatttgaaattatgaaattattagaagaaaatatagagaaaatgttttataatattggttttttgggtaaagattttttggataagattataaaagtaataaaagtaaaaatagataaatggaattatattaaattaaaaatttattaaattaaaaatgtttttatagtaaagaaaataatagcgtgaagagataatttatagaatgggagaaaatatttgtaaattatgtatttgagaaggtgttaatatttagaatatattatataaggaatttaaatagtttaatattaaaataaaataaaaaataaaataaaataaaataaagtaaaataaaataaagtaaaataaaaaaatttgattttttaaatggttaaagggatttgaattaatttttttttaaagaagataaataaatggttagtagttatttgaaataatgtttaatattagtaattattagggaaatatatattaaaattataataagagaggattatttgaggttagagtttgagattagtttaggtaatagagtaaaattttatttgtataaaataaaaaattagttaggtaggatggcgtatgtttgtagttttggttatttaggaggttatagtaggaggattttttgagtttcggaggttgaggttatagtgagttatgattacgttatttattttagtttgggtaatatagtgagattttgtattaattaaaaaaaaaaaaaaaaagagtataatggttgttgttaggggttggtaggaggggaaattgagaggtgatagttaaaggtataaagttttagttttaaaagagaagtaaattttggagatttattatattgtatagtgtttatggttaataatattatgttgtatagtaaaaatgtattaaaagagtagagtttatattaagtgtttttattatatataaaaaaataataataaaataggtagggggaattttgggaggtgatgggtatgtttatagttttgatggtggtgataattttatgggtatatatttatttataaatttattgagttttatagattaaatatgtataattttttatatattaattatattttaataaagtgattttaaaaattaaaataaattttttatatttgaaaatattaaggatttattgtataatatattaaaatttttttattatattttaatttaaaatgattaaggattatgatttagatatattaattaaatgtaataagaggttttattgtttgaaaaatagaaaagtagtaaagagatagatttttaaatgttatgtttttggatgataaggaaaattttgaagaaataggtggaaaaatttaatagatttgaaaataaatgttgtttttaaaaataattatgtggtttttattttaaaaaatttattgatatgtttttatattaaatttatagagttttgttaggtttttttttttaatttaagggtaattaatttgaattttttaatagggttttagtaaagtataaatgaggaaattatatatatttaatggattagaatattttaagtgtatggatttcgatatgaagatagaaagtggagaaaaggtaggtaaggtgtatttagttagttaaataaatatagttatgtgttgggataatattgggttggttttatatttagagtatatattaaaataaagaatattaaatatgaatattgatatttatatttaagatagttataattggattgaagcgggttagtttttatttatagaatatttttgatatgtttaaaaatttttaaaattgtaatgaagtttaaaggtaatttatggtttttatatatttaggaatggagaaatgttttaggattttggttaatttttttgaagaaatttttaaaattttttttattttaaataataatattagttatagttattgaatttaaaatataaattaaaattgtagagtgagaagtgttatatagtatagtagattaagtggagtatttaatttagatttggggtgttgaggaaagtttttagaaaaagagatttgatattgagaattgaattatatgtgggggtttattaggggaatagtagattgaggtaagagggatttttagtaaagtgtagattaataatataaaaggtaattgtttagaattttgtttaaattagggatgttttttttttttaggtatttatattgatttataataatggagataaatattttagggtatttagagatagaggttagttaaaggaatatattattcgtgtttttatattttgattttattattttttatttttttgttggtgattggtttatttatatagtatttttttttttttttttcgttttttttttttttttttttttaaggtttttaggaaattcgtttttttagaaggagatatagatgtttataatttttgttggtatgtttgggtaattgtttttaaatgaatgttgatttttgttattttttttggagagaaaggaaaggttgtggtgttatttaattatttttattattttatttgtgtaagatttattagataggttttttattttgtaataaaaatattaaaataatattaagtataatttttataaaaggattttttaaaagaatttgataattattatatgttttttttttttgtagaaatatgtataatgtattttttggaagaggggtatatagatttgagtgtggtttattaatggataaaatgttataataaaatttttcgttttttataagaaaggaaagtattatgatatgttaagtgtgagggggatttttggttataaaagtatattttattaagattgttattttgtttaagtaagtagtagatggatttaaaaggattttataaaatagagtaaggattttggattttattttaagagtaaaggtaagttattggaggatttttagtattaaagtgatatatttagatttttgttttagaaaaattatataagtaatatagaaaatggattattaggggagataagattatattgtaagatggaagattattttatagtaattgaggtttagtttagttatatgaaggaatagagaaaagtatttagataagagatgtttattagggagaatatatagtatttagtatttagattagatatagtaaaaaaaaggaatagagaggaggtaaagatgttgtttaggtttttgattagagaattagatgtgttatgttattatatattgaaaggggtaataaaggagtaggaatatatttggataaaaagataggtttagtttagggtatggtgagtataagagatttggggtatttaaatgaagaggtttaataggtagtgggtatgtgaggaagaggttaggaaataggtttgagttgaagatatagatgtagaaatattaatagagagatagtaattaaagttatggaaatggatgagataatttagggaggatgagaaaaggtttgggttaaggataatagagatatgggagtaaaggatggtttagttggtttgtgaatatttaattgaagaaaacgttttgtatttagggagaagtagtatgagttttgttgagattaattagtagatttgtagtttatttattttgtttttagttgttatttttaggtttagtttgttatttttataaagattatagttatttaaaataaataaaagtagttaaaattaattggtaaaattattgttttagttttatttagtagatttgaagcggatattatttgtgtagttaagtaatatataaatataagaaattaattttgtattataaacgtaatttaaaagttatattaggatagtatagatatatagtaatattagatagaattttaaagtgttataaaatataatgattttattttttggttgtaggttttaaaaatattacggtatatatggttttaagattttaaattgtagttatgtttttaagttagtttgtttttttatttaagtgttgatagataaaaaatatagttttagtttaatatattatttattttatttttaattttatttgagttttaagggtatttttgtaaagtaataaaaatgtgtagaatcgaggttaattaataattagttttgaaaatttattgaatttttaattgtataatattaaaatttttataatttgtaatgagtaataagaaaatttgaaatttttttagttttgtttaggatttttttaaagatgaagaatatattattttaagaaattgtatgtggtttttttgtatgttatatatatagttttttattaatagtgattttattgttagatatttatatgtagattatattttagtaaaaaggttttaaatttagtattgaaatcgttatttatatttaatcgtttttttggagtaaaattttgttttttaagttttagaataggttttattttttagttaatatttaattttttgttaaataaaagttattaatggtattataaatatattgtatttttgcggttttgtagtggtttatatttgtaattttagtattttgggaggttgaggaaggaggatcgtttgagtttaggagttcgagattagtttgggtaatatagtgagattttagttttataaaatattaaaaaattagttagatatggtggcgtatgtttgtggttttagttatacgggaggttgaggtgggagaattgtttaagtttgggaggtcgaggttatagtgagttatgttcgtattattgtattttaggtagggagatagagtgagattttgttttaaatgtatgcgtatatatatatatataaaatggtatttttgtatatttaaaatttatttttttaaagtttgtttatttttatttattattgattggtaatgtatgtgttatggatgttatattttttattattagaatttttagaagtagggattttattagttatttttttgtaagggtttatatataaaagttatttgatattagcggttagttaattttatggttttttaaatatagggaataaaaaaggaaataagttttttaatattttgttttatatttgaaatttagtaagtatcgtatttatttttattttttttattttagttttttatttttatttattgaaaaattggattatgaaatttaagtagaagggaaatttggtaatggtaagattaagaaaagggaagaagtttgaagaatttaaaatatggaggagaaaataagaaagaatgatttaagtaaaagattaaaaggaaaatttaagttaaaaataataaaaaggaataaaatatataataaaatatttgataaggtaatgttaggtgataattaagaaaaagaagtttgtaggaaataaatataatttttttttttttttttttagatagtttcgttttgtcgtttaggttggagtgtagtggtacgatttcggtttaatgtagttttcgatttttgggtttaagtaatttttttgttttagttttttgagtagttgggattataggtaattgttattacgtttggttaatttttttttgtatttttagtagagacggagttttttttgtttaagttgatttttaaattataaatgataggataattgataattttaaaattttagtttagggatatgtggttattttattttggtatttgttatattaaatattattgttgatttggggtgtttttacgttagaatgagaggattattattatttatattagttgttaagagatatattagcgattgggggttggaaagagagttagtggtaaagataatttcgtagtaggttaagggttgtataaaataagtttggtattgaggttaaaattaaacgaaatgaaagagaaataagataggggaggatgagaagaataaatatagtatgagagtgggttttttttatgtagaaggaaggtaaatatttgtaattatttggtggtgagtgttattaaatttaagattttgtttttcgtttgtaattatttttcggttaagattatataaagaaaaaaagagatttaaaggttaaaatgatgaaaagtggttaaagttagtataataataattattaaaatatatatatatatatatatatatatatataaaattgttaaagtaatagaggagttaatagtgtatgaagaatatttttgattgatttagaaagatgtttattataaatttttaagttaaataaggaagttgtagaaaaatatttataatattataatatttttgtataaaatatttatatgtgtaagtataggaagtttttaaaaataagtgttggtgttatgagggatttgttggggttttttgttttttttggttttgggttttttttagataaggttttgttttgtcgtttaggttggagtgtagtggtatgattgatttaggtttattgtagttttaattttttttaagcgatttttttattttagtttttttagtagttgggattataggtatgtattattatgtttagttaattttttttttttagagttgaggttttattatgttgtttaggttggttttaaatttttggatttaagtgatttaaagtgttgggattataggcgtgagttgttatgttttgtttgggatttgttgttgttgtattttttttttgtgttttttaatttaattgaaataaaaataataatagttttttaaaataaaagaaaaaaggtttggcgcggtggtttacgtttgtaattttagtattttgggaggtcgaggtaggtgaattacgaggttaggagatttagattattttggttaatacggtgaaattttatttttattaaaaaaaaaaaaaaaaaaattagttaggcgcggtggcgggcgtttgtatttttagttattcgggaggttgaggtaggagaatggtaggaattcgggaggcggagtttgtagtgagtagagatggcgttattgtattttagtttgggagatagagtgagattttattttaaaaaaaaaaaaaaaataaagaaaaaaataaaagaaaaaagattttttaaattatttagtttttattttgaattaaatatgtttaatttaatgaatttgtaaataatttttttaatgtagagtttagttttaggagagttgtttttacgtggtggatagaaggggttattggttaattttagttgtattttggtagaaagaaatataagttttaaagaaaaacggaaaggtttgaattcggcgttattatttattagtttatttagtgagttagggtaaatgatgtgaaatttttgagtgttaatttcgtttttttttgggagtgaaatagaatttattttaaagggttgttttgaggatttttgagaatagtttttatttatgaagatatagtttggtggggtagattttaggaaatttagtgatttttttgattaaaattatattttttgttattttaggaaataatttgtttcgagaaattttagaatgtaggtcgtttttagtgatttgtttttagtttgtgaatttttagatttattagtgtttagtagagtagtggggttttgatagttttttttaaagtatttgtgtttatttttttcgggagagtatagtaatatttagtatagtaaattagagtagtacggtttagatatgaaggtttgttttttgtaattttttgttttataaatatattagaaagtttagtaggggtaaaaaatagtttttttaagggttatattgtagaagtatggttaaatgaatagtatgattattgtagacgtagttatagatttagtatgtatatgatattttggtagagtttgtattataatggttgtttattttttagtgttgttttaaaattttgaagatgtttattataaattttagtatttttaagtatgttttgaatttaaaaaagtttagatttattggataagaaaaaaaagagagagggagaggtgtaaggtaagtatttagaatacggttgtatagttagattttttgtaaggatggaaaggttttggttttatttgtttatttaatattgtaggcgttagttgtatgtggtttttgaacgtatgtaatatggttaatgaatttgaggaagtgaattttgaattttatttaattttaattaatgtaaatttatataattaaacgtatttattgattatggtattggttagtatagatttagaattttgggttaatgatttgtgttaatttataaagggtgatatgtagatgagtgagttaagtttaaaaagggattagttaaaaaggagaatatacgcgtattagtattatgttaatatttttttgtaacgtatgtagtttatttttatgaagttgaggttttagtttgattttaatttgttttcgttagtttaggttgttataataaaatattatatatatggtggtttaaataatagaaatgtatttttttataattttggaggttgtaaagtttataattaaggtttattaggttttgttgagagttttttttttggtttgtatgtaggtagttatttgtgtttttatatgattttttttttgtgtttatgtggggagagatttttttttttatttttttttttaaggttattaattttattagattaggattttatcggtatgattttttaaaggttttatttttaaatatagttttattgggggttatagttttagttttaatttatgaatgggggaggggtggatataatttagtttataatataattttttatttttttttaattagtttttttgtaatgagttttaatatggaagggaagagataattattaaaaatatttttagaacgaaaagataggagtttttagattgaaagggttgattaagtgtttaagaaaatggatgagaagagatttatattaggtatattattatgaaattgtaaaaatataggaaggtagaaggaaattaaataatgttttataattttaaaggaaaataatttttaatttggaatttttatttagataaattattaattaaatgtgattagaataattttatatttaataggtagtgattagaaataatttattttttatatattttgttttaggaagatattagaatatttgttttatattaagaggagggagaaaataaagaaagaaaataaagtaaatagaagatttaatattaagaaaggagagaaggatgaatgatagtgaaggaaaattttagggcgattgtaaaaaagtttttaaataggaaagggaggggttttttgtatttgtttagattttttttttaaaatataatatttttaaaaatattaaaagaatttaaagaaatttttataatttttttaattttttttaaaaaaaagggggttaggagtgttggtttatatttgtgattttagtattttgggaggttgagggaggagattatttgagtttaggagtttaagattagtttgggtaatatggggaaattttgtttttattaaaaacgaaaaaaaaaaaataggtgggcgtggtggcgagcgtttgtaattttagttattttggaggttgagatataagaattttttgaatttgggaggcggaggttgtagtgagttaagatcgtgttattgtattgtagtttgggtaatagagtaagattttattttaaaaaaaaaaaaaaaaaaaaaaaaaagggaaaatagaagaaataaggtagaggtgaaggtaatagatgtagtttgttgtgttttttatgttgatggaaatagttaaagtttttttgaaaaaggtattattatattaattatgtgtttttatagttattaattttagattataatatggtatttgataatgtttggttttaattttttttattagaaaattaatagaattttaaaagtaagtttaaataagagaaatttaattgtttttttttgataaatgttgtttttttaatagagtattgaggatcgtttataaatagttatttaattgttttattatttaatttagaggtttttttaaaagtttaataaaaaaaaatttagtaaaggtaaatggaatttaatgtaattattaataaataagtaaagaaaataaaattattttatatatatagttatgtataaagaattaggttaaagtttagttatttagtatttttagtggatttttgtatgtttttaaatttggtaaatattatagaagatttaattggaaattagagtatagaaagaaattttagaaatgattatatggttaaaatgatattttattagatgttttattaagtggaaattaagaagaaaaaaatagattaagattggtataggttttgaatgtttgttttattttgtttagatgaaagataggattataaaaaaatgtgttttaaattattttagaataaaattttttttttaaatgtagtattttaaaatgttatattaatataatttttaaatagtaattatttttagtatttttttattttttaattgaataatgtaattgagttttattaatagttaattttttttaattttaattttaataaatttatttaagttaaatgattattaagaataaaagatttatattgtatttttgtatttttataatttaaaggtaataggattaaatgtttttaggttgtgaaaagatacgttatattttaggttaaaagtatattttattttaaaattaggagtgaaaataaagtttgaaaagaaatgattttttagttttgaatttggtggtattaatattaatgataattttatttattttaaaggtattttttagagtgtttatgttatgaaaattgggtttggaatgttatttttagtaaatttgaaattgtttaatttgaggttttgttagatttgtaatagttgtattgatgtttataattgtaataaggtttttatagtatggtatttttttatatattttttagatttggttggtataaatatgttgtattgattaataaaaatgagtttggtatttttttatatttataagtttagttagaataaagttttgttttggattaatattgtataataaatgtattaaggatttttagaagttttatggtattggttatagaagaataggataaaaatttttatttatatataaatatttggaaaatgatttagtttgtgtttgtgaaatttgaattttgtttggggaaaagatatgcgtattaaatatattgtggatttaatttgtttgttggtatttattgagggttttagggtatattattaagtagaaattggttgggtagtatttaaagattatattttttttaatgtttttatttatatagtagaaagatgtaatcgaaagtttgcgaaagatttgtttaataatgtttttataggaagttttagttttttttggatatcgaattattggtgtaataaaaagagtattagataggagttagtttttttgggtaatagttaataattttgttattaaatttagtttttttttttttaaatattttaaagagaagttattatttaaggtaaatgttttttgttaaaattagttgggtttgggtaattagaaatattcggtttttttgattattgaaaaggttattattttataataattaagatatatttaaaagttgtatatatataattaatttaagaagtttattagtagttatttttttttgggtaattttttgggaattttttaattatgagttaaagtaatttttttgaaaagtttttattttattttttttttttaatttttatttatttatttagtttttagatatagggtttcgttttgttatttaggttggagtgtagtggtatgattatagtttattgtatttttaattttttaggtttaagcgatttttttattttagtttatagttgtatgttatattgtatgggtttatagttgtatgttattacgtttggataatttttgtattttttgtagagataaggtttcgttatgttgtttaggttcgttttgaatttacgggtttaagtgatttgtttatttttgttttttaaagtgttgggattataggtgtttagttttgtttttttttttttaaaatgtttattttattttagtatatatggttattgtgagaattttatataatttatatggaaataatttggaaagtataaagtatttttaatagggttattgtttaaagtaatgttagaaataaattaagaaattaaaagaagtagttaataaaaaaaaattatgtttataaaattaacgtatttgtataaaattaatagaataaaaagttttgatttataaagggtatatagtattttattgtttaagaataataataattttttttatagatatgaaatttagaagttattagagaattttgattaatgtagtaatttttttaataagtatgataaatttgttttgatttgtttatttttttttaagtgttagtttaataattgaatgtattttagaattatttaaaatttaaattattttagataaaggttataaatttaaagtttataatagataagttaaatgagtaaagtaattagataggtttgtggtgaaaaatagtaattgtttaaagaagatagttagtaggtatagtttagtggtagagtatttgattgtaaagaagatagttaggattttatttttgttagttgttgttggaagggaatttagatttgttgttgtttaattgtttgttttagtttgttttgtgttgttatattagaatatgtgagatttagtagtttataaataatagaaatttattagtttttagttttggaggttgggaagtttaagattgaggggttatatcgtaatggaaggtattatatagcgatagagtataagagggttaaattcgtttttataataaattattttatgataatattaatttatttatgtatattagtaatattttagaaataatgtttttaaaataatatgtagttatttagttatagttattttggttataaaataatgtaattaaaggtggttttgattaagtattataatatttttaaatatttgttttatttttattattttgttttaaaaatatatttttttaaaaatttatttttaaattaaatattttaggtttaattttttttttttttttttttgagatagggttttgttttgttatttaggttggagtgtagtggtgtaattatagattatcgttttttgtttgtttgtttgtgtaatggtttaattttagtttattgtaatttttcgagtttaagcgatttttgtatttttattttttaagtagttgggattataggtatatgttattatattcggttagttttttttgtatttttattagagataggttttattttgttggttaggttggagtcgaatttttgattttaagtgatttattcgttttggttttttaaagtgttgggattataggtaggagttattttgtttagtcgatttgtatttttgattattaggatttaagtgatttattcgtttcggttttttaaagtgttgcgattataggtatgagttattacgttcggtttagatttaaattattttaaaattaaaaagatagtataattttaggtaaatattagatgggtatagtatatacgtgtagaattaaatgaagatatttgaaattttgatagaatgaaataaatttttagtttttaatatttttaaaggaatgttattattaaaatttaagatatttttaagggtaggtatagtgtttgttttatgtttgtagttttagttatttaggaggtttaggtgggaggattatttgagtttaggagggtaagattgtaacgagttatgattgtattattgtattttagtttgggggatcgagtgagatgtatttcgaaaaaagaaaaagatatttgtattgtattttttttgtttataattatttaattttaagaaaaaattagttatattatattattttatataaaaatatttttgttatttttaaaattggttgtatagttttaaaaagttattatttattaaaatatttattattaagtaaaagttttattagttttgttaatttttttagtgtaatgattaaaaattttaatggtattagttagtattagaaatataagatatttttttgggtgttaaatattgtagaaaatattattttataaataaaatgtatgttgttatattaataataaacggttatttatttttacggtttatgattggaaatttttagttaacggttttaagtaaaagtagtaattcgatattatttgtataaatgtatattttatatagtgttttattataatttttaatatgtaggggtagataggttaagtaatcgttataatttatgttggataaggttatgtttgggtatattaaatttagaaagttagggttaaatataattgatttttttagataagtgttttattaattaattataatgtataatttgtatatattgtaaattattaaatatatattaagaattataaaattatattatattatttaggatgtttttggtttttagtaattgaaaatttaattttatttattaagataggttaagttatgatgtagtaatttttttttgatattatatgtttaatatgttatgtgggatatatatgtttgtggggtgggggtgttgttttgttttatagttatttatggatttagtatgataggtgtttagatattttaatatttagtttttagaattattattgtaaaaagaagagatagttaggttaggaatttgttattaaatgtttttatttggaaataatttgtttaaaatttattggttagaataattataatgttttatttagttgtaagtgaattgggaaatgtgagggaagatttaaatatttagtaagtattaaatgtttttgttgtattaagtaaaattagttaaaataataatgggaggttaggtatggtggtttatattttttattatagtattttgggagatttaggtaggaggatagtttgaggttgggagtttaagattagtttaggtaatatagtatgattttgtttttataaaaataatgataattaattagttagatattgtggtgtatatttgtagttttagttatttaggtggttgaggtggtatgatttttggagtttaggagtttgaggttgtagtgagttatgttcgtgttattgtatttttggttgatagggtaagattttgttttaaaagagaaaaaaaaaaaaggagggggggaattcgttggtttaagaaattggtaagtttagaaatagggtagattttatagttgatttgtttttttattttgttttttttatgatagtaaaatagttttagttattatagaagttatattatatttatattatttaaaaatagagtatatatttttgttttagtattttaagtaagagatagattttagatgtatttagattggatttgtttgagtttatgtttatttttaattaatgattgtgacgaattaataaaatatattttttaaattaataaaagtttatttttaggagttagaggtagtattagtgttttttagagtttatagaatagtgattattaaaagaaaatttagggtttgttatgatagagaagggaggaaaggatgttggtatttaataaatattaatgtagttatataataaaaaagaatatattttgaagaagttggttaagagttgtggaaataagtatatatatataaggtaataatatgaattgtagtgtataaagatagaggaaaagttattatgtataattataaatggttattaataaattaggcgttggttaggagcggtggtttacgtttgtaattttagtattttgggaggttaaggtaggcggattacgaggttaggagattaagattattttggttaatacggtgaaatttcgtttttaataaaaatataaaaaattagttgggcgtggtggtgggtttttgtagttttagttatttaggaggagaatggtgtgaattcgggaggtagagtttgtaatgagtcgagatcgcgttattgtattttagttcgggagatagagtgagatttcgttttaaaaaaaaaaaaaaaaaaaaaattaggagttaataaggaaatttattgagtatagtatttgaatgtataagtataattataaaaataggattaggttaagtataatgttttataatgttatagttttaagtaaatagtaataattaataaaaataaaatgataataaaaaggaattagttataggagggtgttggaagttattaaggtaaatggtatttttaaaattttataaaagaagtaaaagtgtttggtaattttatatttttgaattgaattaggtaaagaaggaattatagatataaagttatagttttttatttatttatttttttttttggagatagggttttataattttgtttaggagatttgaatttataattttttagttttagttttttaaatagttgggattataggtgtatagtattgtatttagttaaatttatattgtttaaatagttttttttgaatttgtgtgtgtgtgtgtgtgtgtgtgtgtgtgtgtgtgaaaaatcgtagttttaaattgttttatgggtagttattagagtaatagattttagattttattaaaatagttaaatgtatataaaatgtttatattatatataaatgtttttgaattataaaagtattattggggttttagaggaaaatgaaaatataagttttagaaatttgaaaaatgaaaaataggggtgaaagataatgagaagtatagttatatttaaagttaggttatttgggaattttgtttattggatgttataaggtcgattatagttttaattttgttttttttttttttttttttaatttttgattttattttttatgataatttatattgtttttaatttgtaaaggtatggaaaggtagttttattattttataaaagtttatatatttttatataaacgtgtttttcgttatgtggaagtgggagaaattttaggattaatttttataatttaagaaaatgaatagattaaatatttttattatttatgattttttgaggaagtttagagtaaaggtgataaattagtttgggtttagttagtaaaaagaaattatataataatttgaataaggaaagttaattataaataattattgttgttgttgttatttttttttttagagagagggttttattttgttgtttaggttggaatgtaatggtataattatggttttaagtagttttaattttttgggtttaacgatttttttatattagttttcgtagtaggtgggatatatattatttttagataatttcgtgttttttgtagaataggggttttgttatgttgtttaggtttgttttaaatttttagttttaagtaatttttttaagttttgcggtttcgtaaagtgttgggattataggtataagttattatgtttagttaagaattatttattgtaataggattggagtaataaggtgttggttagtaagaagtatagagaattttataaaatataggaataggagatataaggaggagttattgtttttagggttgaggtgggtgttttaaggaaaaatatttatttttttttagaaatgggattaagaattttttggagggagtatagttatggtttattgaatacgagagatgtttttgtgggtgttgtattagtataatttgttggaaaattatttttggtaatttgttagaaatttattttttagggcgttaggaaaagtgtttatagggaggtgttttattataggtttagttataaaatcgtttgagggggatgttgaggtatatagttgattattgggtgtagttgattatagcgtattataagagtttgtattggggaagatatatattatagaagtcggcgttgtagaagtatatatgttaaggatttagcgttggagacgtgtatacgtttgggaataggtgttggggcggtatttaagtacgggagttagcgttggggaagcggtatattttagggagttagcgttggtaaagtatatttattaagagtgagcgttagaaagtcgtatatattatgggagtttcgttttggagaagcgttacgtgtgtgtttgggaattagtgttggagaaagtatgtggaagttggcgatggagaaggcgcgcgtatgtgtgtataatttcgttttggaggagttacggttaggtgcgcgtacgataatttttatcggagaagttatacgtatgcgtgcgttggagaatttgaatttgtaattttaaatttttttataaagaaatatttacgaattgatgattttgtgagtgaattttattaaatatttgaagaaaaaaaaatattaattttttataaattttgaaaaaataggagggaatattttttaatttattttaagatgttattattacggtaatattaaagttagatagatattataagataaaatattattaatattattatgaatataatataaaaattttaaataaaatattattaagttaaatttagtaatatgtaaaaaggattatataatatgattaaatgggatttagaatgtaaggttagtataaatatataaattagttaataaattatattgataaaggaataaaattatagttattttaatagatgtagaaaagtaatatttttaatatttgtttataagaatttttaataatttagtaatagaaggaaaattttttaatttgataaagtgtatttatgaaaaatttatagttaacgtcgtatttaatggtaaaagattaaatgttttttttttaagatgagaaataagttaataatatatattttatgtttatttagtaaagtgttggagggtcgaattaggtaagaaaaaaattaattaggtaaaaaagaaattaaaggtatttatatggaaagaaaagtaaaattatattggtatgatgtcgtatgtagaaaattttgtgtaatttataaaaaattggaagtaattattaagtttaataaggaaggttgtaagatataagattaataagtgaaattaagtgtatgtttatatattgataataatttataatgaaattttaaaaataattcggttgttttatttgtggagtagttattttttatttttttgtttttttaataaatttgttttcggtcgggcgtagtgatttacgtttgtaattttagtattttgggaggtcgaggtaggcgggttacgaggttaggagtttgagattagtttgattaatatggtgaaatttcgtttttattaaaaatataaaaattagtcgggcgtggtgaagggtgtttgtagttttagttattcgggaggttgaggtagaagaatcgtttgaattcgggaggcggagattgtagtgagtcgagatcgtgttattgtattttagtttgggtaaatagagcgagattttgttttaaaaaaaaaataaaaaatttgtttttattttatcgataaaaaaaattttaatgaaattttaaaaataatttaatttataatattattaaaaataaaattttaaaattaatttataaaagggtaaaatttgtatattgaaaattattaaatattgttaagagaaattaaagcgtttaataaatggaaagagattttatgtttatgatgagatggtaatttttttttaaatagatatgtaaaattaaatgtaatttttataaagtttattatagtacggttttttgaaaaaaaataataaattgatattaaaatttatatggaaatgtaaggaattttgaatcgttaaaataattttgaaaatgaagaaaaatattggataatttatattatttaattttaaaatttattataaagttgttataattaagataatgtaatgttgatataaaaggtatgtaggttttttatttttagtttcgtattaaatttgagttagaagatgttaattttaaaatggaggtaaaattattgtttgttagtttttagtttaattttggtggttaatttgaattgttattaattttatttttttagatacggttttagtttgttgtttagtgtggagtgtagtggcgtaattatagtttattgtggtttcgattttttgaatttaggtgattttttattttagtttttcgagtaattgggattatagtttcgtattattatggtcggttaattttttaattttttgtagagatagggttttttttgttgtttacgttggattcgaatttttgggattaagtgattttttcgttttcgttttttaaagtgttgggattataggtataagttattatgttttgtttgttatttgaattgtttttttttttttatttttgtatttttattaaaatattgtaaaatttttaaggtgttttttttgtatgtatttttttatattaagttaattatttaagatttataaataagatagagaatgtatatattttagtttaaaataaaatttttaaaaattatttggtgtttatttttagttcgatttgaggttttaatattattaatttggaattattatttatgtgagttttttttggttttttttatggtttagataattaatttaattttttattggttaggttggtttttttgtagttggtttttataaatacgaaatttgtataattgttattggaattatttgttgaaatatggaattggttaaaagtattatttgttttaaaatgtatatgtatagttgtatatatatgtagtaatatattttttataattagttaattaattaagttaatgttttttattagaggataaaataaaaaatattaatatagagtttgttttttttttttgatgttttggtaaacgtttttggagaaattaagagaaaatatgatcgaataaagtaaaaataaattcgaatgtataatatataaagtataattagtttagtttttaagaagtaggttttattattgggagtagtgggttggtgaaaaagatttttgatatatttaggaaaataaattttttttcgatgtagttttttttgtatatgaataatgtatatgagtgtttatttttaggtgattttggtatagtatataatattgaaatattaatttaagtttaatgtataaagtcgtaatgaatatgttttttatttaagtttaggtaatgaatgattttaatatatggtatgaattttattgtttgtaataattttttaggggagtaaggagaaaacgatttgtttgagggtatattattgatagtgagtgatagttataaagagttgaagttgggtggtttaaaagtgttttgtttatttgataaatgttaagttaaattatattatagtttagatgtattaaatggggtataagttagaataaaattagatgttcgggagttttttaagttttagattagaataaaagtttaggtatatataggattttgttagaaaattttttggtttttttttttaagattttggtatttaattttttatgttataaaattttaagtttttttttttattcggtgcgttggatatataagattatagagggttcgtagttgtaaacgtatttatttaaaaaattaaaaagagtaaattaataaatagtatttgaaaaattttttacgggttttgaagatatggtttggcgtttataaaaagaatggagggaagatattggtttttgcgaattcgttttttttcgggaataaaaggcggagggcgggaggggtaatagtcgcgtttcgggtttttttaattggatttcgttttttttggcgtttcggcgaatggggtttgggggtaggggtgtgagggacggggaggacgaggttagttgtagagggcgatcggtttaaaggggcgagttttttacggtttttacgagttcgaggtagagaaatttatttttgttttttttttttgaagaagatatagttgtttgcgtttaatgaataaaaagaattaaaacgttaatattcggttttcgttttttcgggggttttttttcgcgcgattttagcgtcggttttcgttttcgtttttttcgttttggtttcgtttcgcgggttggtatcgttcgttatttttcgtttttcgtttttcgtttttcgttttagttttagttatagttttgcgtcggcgggaatttttttcgtttatcgtaaggcgcgtttggtttattcgttttcgcgagtttttttttttgtttttcgtttttttttttcgttttcgtcgttgacgtgtcggttagattttcgagggaagttttcgttttcgttgcgttttgcggtttgtcgtttatcgggtggttttcgcgggagttgttttagtagtttgggtagtggcggaaaggaagttatcgttcgggatttgtggtttgaaaatttggttttgtttcgtattggttttttgagtttttttggaattttttcgcggtcgttcggtagtggagtcgcgcgcgcgtatacgtgttagtagtgtattttggggtttggttagcggtttcgcgcgttttcgcggcgtcgcgggaaaatttcgacgaatttcgggttcgtggggcggggcgggcgcggttagggttttggcggaagtgggttcggttggggcgggttttaggcgagcggagtcggtattgttttagtgttttcggtttcgcgcggaagtttcggcgggagtagggttgtagtagcgttcgcggagaaggggcgttggttttttttatattttgtttaaaatgtaggggaggtaaaatggaaattagtttttttgaagaaaagttgaggttttgttaacggggtaaaatttttaaaataagattttttaattgcgttttaaataatagtaataaaaaaggtatttttagttaatgattttttttatcgtatattagttttatatagtgtttggtcggggtttaaattagtttaacgttgtatataaattatttaaataaatattaataaaattttttttaaatttttatttatgataatggtattagtttgttttggtgaattttttttttttttaggatttgacgatttaagttttaaaatgttttaaattaatgttttataattataaattataattataaaattatagtttaggtcgggcgttgtgttttaggtttgtaattttagtattttggaaggttaaggcgggcggattacgaggttagaagatcgagattattttggttaatatggtgaaacgtcgtttttattaaaaatataaaacgtttaatcgggcgcggtggcgggcgtttgtaattttagttattttggaggttgaggtagaatagtttgaattagggagttagaggttgtagtgagtcgagatcgcgttattgtattttagtttggcgatagagggagatttcgttttaaaaaaaaaaaaaaaaaagttataattttatatatacgtttaaaaatatattataggtcgggcgcggtggtttatatttttaattttagtattttgggaagttgaggcgggtggattatttgaggttaagagtttgagattagtttggttaatatggtaaaaattcgtttttattaaaaatataaaaattagtgtgtattttcggttatttaggaggttgaggtaggagaattgtttgaatttaggaggcgaaggttgtagtaagttaagatcgtattattgtattttagtttgggtaatagagcgagattttgttttaataaaaaatattataaagttgtgtgtgtttgtaataaaaatagtttttaagtatttaaatatgtttaattatttttatggtgaagaaatattcgttttattaatgaatatttttaatttagagattaatttgtagaggttatatatttataagtgatataataagtatatagtatagtaatagtaataatttgtttaagaattaaaggtagttaaaaaaaggaatcgatttagaggttgagataaaattggtagaatttgtaattatattaaggaattcggtgtttatatttattttcgaaattattttatgttagttaaggaagtcggtgttttttgattgttttttaattttagattcgggggtatatgtgtttgtttgttatataggtatattgtgtaatggtggggattgggtttttggtgtatttgttttttaaatattgaatattgtatttaatagttaattttttagtttttattttttttttattttttttttttttggagtttttagtgttttgttatttttatttttatgtatatgtatatttattgtttagttttcgtttatgagaatatgtaatatttgattttttgtttttgagtttgtttatttaggataatgttttttagttttatttatgttgttgtaaaggatatgatttcgttttgttttatagtagagaggtcgatgtgtttttgatgtgtgtatagtgtgatatggataaattaaaagtaagttttgggtagggaaatatatgtttgaggggtatttatcgtggtattttgattatgagaaagttatttttgtggtaataaatcgagagtgagttgacgtttaagttttgtatttattagtaaagaaagtaattaaagtatgtattttttgagagaaattatttattttggtatttatatttttttatatattcgttgaaaaattatttttagtgtttgttaatgattgatgttttgttatattttagttttttgtttttttagtttagtggttaataaagaattgttaggtttatttaattttgtagtatatgaaatgatattatgtttaggtttaaattagatttaaataggaagtatatatagtataaagatttaaatttatatttatagggatttattttgtttggtatttatatatatggaattattttaataatattttaagtaatagtgagatgtttattttgtaaaatgtttagaaagtttttagagaaatagatattttaatataaattttttttttaattgaattataaaattgattatgggtgatttaatttttgtttgtgtgtgggagtgtgtgtgtgtgtgtgtgtggttttgatttgtttgttttgagattgtattttatttttatttaggttgaagtgtagtggtgtaaatatagtttattgtagtttcgatttttgcgtttaagtaatttaattattttagtggtattaaaatgttggaattataggcgtgggttatcgggtttaggtgtgtgttattttggaatatagttttggttgtagtatagaatttaattataaataatgtcgtaaaatgaaaaatggtttatttaggtgaaaattattatatcgtttatattaaatttttatattttagaggaaaataagttaattggttgagtgttgtaaagtttttgatattattaaatttttttttaaagtttaataaatagaattaattgttttagaatttacgttgtggaaattattgtattaagatttttatttttagaattagtttagatattatttatttggtttttagtttttatttggtattttaatatttaatattatttttttttttttttttttttttttttgagatagagttttatttagtcgtttaggttggagtgtagtagtatgattttagtttagtttattgtaatttttgttttatcggtttaagtaatttttatgttttagttttatgagtagttgggattataggtatatgttattacgtttttaatattattttgtttatggttttgatatttgttttttgtattttagttgtgaataatgcgtgttgaagttttaggtattgggttaattttttggtttgggttattttttttgatttttatagtgattttatgtaatttatagtggtaatattttatttttatagatatagaaatttatgtatagagttattttttttagtggagggtggaatttggttttaattttatttatagtggttttttatttataatgtttttgtttttggtttaggttggtgatttgaaaatagggtgaggtgattttagaggtttttgtattttaattattatattatttttttattaaaatattttaattgaggaaatgtaagttgaattagagaagagaataatgagaatattttttgtgttagaaatattttaagaaacggagtagataatagtgaagggttttgatttgttatcgtgaaggggaaaaggttaagaaagggatggttgtaggagatggaaatttatggaaaaagggaaatgtattataaatgttgtatggaagttgttatttttattttgttttcgatatgtttattttttaggttttgttgaaagaatgtatttaggaggatatgtttgtattagagtttttattattagttatagttaattgaattagagatggtagtttgattttagttgaattaattaaattattgttggggaatttggaattgtaatattgagagattgtaatatttttatataataggagttaaagtttttatgttaattggagttatttggggaagaaaaatatgtaagtagtaaagaaagttggttggtagagaaaagtaaaatgacgttgaaaggttgttatttattttgtgagagagaggggagtttttattttttattttttatttttaagtttaattttaaggttaattgattatatattttttttgtttttagttgtttataggattgttttatatttttgtaatagttatttttttatttatgttgattttagtgagttttttttttttattgtaaagtaagttttgattaagaatttggaggtggtagttttttattgtgttattgggtattcgtattttggttgagtttatttgataaattaattaatagatatttattgcgagattattatagggaatgaaaaatggtttttttgtatttattttaggtttatggttgaggtttttataataaaagattaataggagtaaagtatagatattgtatgtaagttttttatgatataggagtttttttaaggaaaggaagatttagagaagttgttaaatttgtgtgtttttatgttaggttttatgaagagtggatagttgtggggagatatagttgaataaagatgggaataaatttggggggaatttagtaaggtttatttgtttagatttttttttgtaattcgttagtttttagaggtaagaaagtattttttttgtggagataggtattgtggatataggtagtattttttatatgagggttttaggatttgttttaggggaagtttagaaaattattttaaggttttatgattcgtattaggagaaaggagaggagggaaggtgagagtgattttttagtttttgttatgtttttaaatattaatatgttgtatttagtagaagtatgtttttaatttaattattataaagtataaagtataaagtttatacgttgtgtgaaagatatagatttaagtattttagagttgagag

SEQ ID NO: 129 - DNA, 4045 bp, Artificial Sequence
  chemically treated genomic DNA (Homo sapiens)
taatagatcgggggaaggtttgtggggcgttaggcggggtatttgtgggacgttaggttggggtttgtagggcgttacgttgggggtttgtggggcgttagaggggggaatttgtggggcggtaggtggggggtgttcggggcggggtttggggtgtgtgtggcggtaggaggcgggggaggtttgtggggcgttaggttagggtttgtgaggtgttaggcggggtttacgtggggtggtaggtgtggggtgtgtggagagttaagtggggggtgtggggcgttagattgggggtttgggggattagatgggtggtgtttgggacgttaggcgggggtcggggggtcgttaggcgggggatgtgtggggagttaagtaggggaagtggggcgttagattgggggtttgggggattcggtcgtgggggtgtttgggacgttaggcggggggtttgaggggcgttaggtgggggggtttgggaggcgttaggcgggggtcggtttatgggggtagtaagtagggtgtttgtgtagcggtaggtgatgggagttgtcgagtttatagcgttgtagattgcgtcgtattagaagtttggttttttgatgttgtgttttttatttagatttaagttttaggtcgtgggacgatttttttcgtttttgattttttggaattgtattgtttgttttatttgcgtatatgttgatttttttttatggtaatttcgtaggaaattattaagattttattttatagttgggattttttggtttatagaggtaacggagtttgttcgaggttaggtatttattgggaattcgtgaagggttgggggagagtagggggaacgggtagaggaatgatgtagattttttagggattttttatttttcgagagggtatagggggtattggagcgggagagattttaggtttggagggaattattttatttttttttttatatttggttttttattaatttttgggattttaaagtttttttagcgtttttgtttgtttatttttttttgttgagattgttttaaattgttattaagtgttgtggaagataggtagttgtaaattttttgttttttagggaaatatagtttgttaagggttgtatgaaggatattttagttgtattcgttatttatttttttttttttttttttttttttaagtgtaatagtatagtatttaattattttttatagttattgaataaaatttgtcggtttatttttatgtgttattttaggataatttagttagaattgaatgaatgatgaatcgttattgtgtattaattgtttgtatttatttttttgaaagttttgtttattgttaaagagtgaagtttttttttatttttttatttcgttaatattttgtaatatttatattttaaatgttgtttggattagtaagtattatagtattaaaattattaagatttattattttttaaagtatattttgtagattatttgatttttatttttattttaatttttatatagtttttaattttattttatattttaggaaattgaagtttagagaaattaagtaattgtttagtattatatagttgttaaatgttattatttatatttgaatttagatttattagagtttaaaatttgagttttaattaggaatttttttatttgttttattgtaaatggaatgaattagttaaaatttttagaatttaaaaaataaaattagtatgtaaaaatgaatggaagttttaatttttgattttttatgtcgttgtaatgagtaaaaatatttacgattagtttatggtaattttggaatttttgttataggcgtagttattttaggatatatgtgtatttatattattatttatattttgttattataaagtaatttaagtttttgtttgggatttgttgagcgaaattttaattttgagattatgtagaatttatagatatatttgtagaaattatatattaatatttgaatattaaagaaatattagttaatttattttattttatatagtttatatagaaattgtagatatagtattgtgtattttgtttatttttttgagggagtaaattttgggagatagggtagtgaatatatataattaggtgttatagttagttatgtaaattagatttagagagaggaaataatagtatatttaaagataaaagttttaggaaagtggtttgttatgcgtttatttttcgatttaatttatttagtagaagttgggttttttttgttagaaattagattgagaagtgtattttttttttttataggttattaaatggttgttgtaaattattgttagggtagttagagttattgaatatttttaattaaattgaattttatttattgtgtgtttgcgtgcgtgtgtgagtgtgtggtatgtaattagattatagttttttttagtgtgtttatttaggagttaattttaggtgtttagtaatttatttagtaaattttttatatgtttgttattagagtataaattatagtataatttttggtttttagatattgatagtatagtaaatgtagtattgtaattagttatttgatttattttattggatattagataatgtagttttgtgtatgtgtgtgttgtttatttgtttgcgaattggaagatggggagttatatattttttgtattgtaatagatttttttatttttagtaaaatttttttaattttattgtttgggatatatggtggtgtgttaggaggggtttgaaattataggataaaatatagtttttatttatggattatatattttatttgaaatttttttttggaaaagttatttaatattatatagtttaaattatattaaaattattttaatatatttattttttagtagaatttgtatgaatatttaaaattaaagaaatttatatttgtgaaattttaggaaatatttttgttttagtttagtaaggtatttattattttttttttgattttagtagatattttagggaaaagttttttttttaggatattttacgtttgttttattttgttaaagtatttggtattttattatatttagtttttattatattttttttttttttttttttttttttttttttttttttttttttatagaatatatttttttttaaagtagaaatatgtagtatttttttttagtatagtgtatgtagtatattttatatgtagttattaaatatttagggaataattggtatggaaatatgaaaaaagtagtatattaataaatttatatttataagatagtaagtaattatggtaaaatagataaagtgaggattttatgggtagggtattttgagttggaatcgaatgttggtgtgatttggtatagttagtagtgaagaagtgaaaggaaatatagacgtaggttttgtttggttggaagaagagggtatttgtttttttttttgttttgttttttggttaagggttttgtttatgattaggatttttaggaagttaaattttagtttagtaaatgagtgatttgttaaaaatatttgttcgaagattaagtttatttttggtgttatgtggtagtttgatagggaaagaagagatatatatgaaaggtttttttttagaagtttagaagtgaagtgaattaagtttgatgagtttttttgttattattattagtaatatttgtttgtattatgtgttaaataattaatatatagaataattggaatttaaagagaaaattaaaatgatttttgtattataaatataggaaatatagttatatagttgatgatattttttataataattttaaattagggttggagtaaaatagttattaaatgtagaggttgaaaagatatattatttagagtattgattttttttttagtaaatattaataaatatttattatgattttagtgatttttgtaagatttttatattaaatatttagttgaattttattttttatttaaagttattttttttttgttttattagt

SEQ ID NO: 130 - DNA, 4045 bp, Artificial Sequence
  chemically treated genomic DNA (Homo sapiens)
attagtaaagtaaaaagagaataattttaagtaaaagataagatttaattaaatatttaatgtaaagattttataaagattattgagattataataaatgtttattaatgtttattaaaaaaaagattaatgttttaaatgatgtatttttttaatttttatatttaataattgttttgttttaattttaatttgaagttattatgaaaagtattattagttatatagttgtattttttgtatttataatatagaaattattttaattttttttttaaattttagttattttatgtattaattatttagtatataatataaataaatattgttaataatggtgataaaaaaatttattaggtttaatttattttatttttgagtttttgagggaaggttttttatgtatgttttttttttttttgttagattattatatagtattagaaatgaatttgattttcgaatagatatttttaataaattatttatttgttgaattgaaatttgattttttagaaattttaattataggtagggtttttgattaaaaaataaaataaaggaaaaaataggtattttttttttttagttaaataaagtttacgtttatgtttttttttatttttttattgttagttatgttaaattatattagtattcgattttaatttaaaatgttttatttataaaatttttattttatttattttattatagttatttattgttttataagtataaatttattagtatgttgttttttttatatttttatgttagttattttttgagtatttaatgattatatatgagatgtgttatatatattgtgttaggggaaaatattgtatgtttttgttttaaaagaaaatatattttgtaaaaaaaaaaaaagaaaaaaaagaaaagaaaaaaagggggggagtgtagtggaaattgagtataataaaatgttaagtgttttaataaaataaaataaacgtaaaatgttttgaggggagagtttttttttaaagtatttgttaaagttagagaagaaataatgggtattttgttaagttagggtaagaatattttttaaaattttataagtgtaaatttttttagttttaaatatttatataagttttattggaagataaatatattagagtaattttaatatggtttaaattatgtaatgttaaataatttttttaaaaaaagattttaagtaaaatgtatggtttatgaatagaaattatgttttattttgtggttttagattttttttggtatattattatgtattttaggtagtggagttggagaagttttgttgggagtggggagatttattatagtgtagaaaatatgtgattttttattttttaattcgtaaataaatgagtaatatatatatgtataaggttatattatttagtatttagtaaaataaattaaatggttaattataatattatatttattatattgttagtatttagaggttaggaattgtgttgtaatttgtgttttagtggtagatatgtaggaggtttgttgaatgaattattgaatatttagagttgatttttggataagtatattagggaaagttatggtttggttatatattatatatttatatacgtacgtagatatatagtgggtgagatttagtttggttaaaaatatttagtagttttgattgttttggtaatggtttataatagttatttggtggtttatagagaaaaaaggtgtattttttagtttaatttttgataaaggaaatttagtttttattgagtgggttagatcgagggataaacgtatgatagattatttttttgaaatttttatttttgaatatattgttgttttttttttttgaatttggtttgtataattgattgtaatatttggttatgtatgtttattgttttattttttaaaatttgtttttttaagggagtaaatagggtatataatgttatatttataatttttatataaattatgtaaaataaagtaggttaattaatatttttttaatatttaaatattggtatatagtttttatagatatatttatagattttatatggttttaaagttaaagtttcgtttaataaattttaggtaaggatttaaattattttataatgataaaatgtaggtaatggtgtggatatatatgtattttaaaatggttacgtttataataaggattttaaaattgttataaattagtcgtaagtatttttgtttattataacggtataaaaagttaaagattaggatttttatttatttttatatgttaattttattttttggattttgaggattttagttgatttattttatttgtagtaagataaatgaggaggtttttggttagggtttaggttttagattttaataaatttgagtttaaatgtggatggtaatatttaatagttgtgtgatattgggtaattatttaatttttttaagttttagttttttaaagtataaaatggggttaaaaattatgtagaaattagaatgaagataaaaattagataatttataaaatgtgttttaaaaagtagtaagttttgataattttaatattataatgtttgttgatttaagtaatatttaaaatataaatattgtaaaatattaacgagataaaaaggtgggaagaagttttattttttaataataagtaaagtttttaggagaatgaatgtaagtaattagtatataataacgatttattatttatttagttttgattaaattgttttgaagtgatatatgaaaataaatcggtaggttttatttagtgattatggaaggtgattaagtgttatgttattgtatttaaaaaagagagaggaaaaaaaggagtaagtgacgaatgtaattgaagtattttttatgtaatttttgataagttgtgtttttttaggaaataaagggtttatagttgtttattttttatagtatttagtgataatttgggataattttagtaaaaagaaatgagtagataaagacgttagaagggttttgggattttaaaagttaatgaaagattaagtgtaagaagagaaataaagtaattttttttaagtttaaagtttttttcgttttaatgttttttgtattttttcggaaaatggaaaatttttaaggagtttatattatttttttgttcgttttttttatttttttttaattttttacggatttttagtgaatatttggtttcgggtaagtttcgttatttttgtgaattagagaattttagttgtaaaatgagattttgatggttttttgcggggttgttatgagaaagaattaatatgtacgtaggtaaagtaggtaatatagttttagggagttaaaaacgggagaaatcgttttacgatttggggtttgggtttagatgaagagtatagtattaggaggttaggtttttaatgcggcgtagtttatagcgttgtggattcggtaatttttattatttgtcgttgtataaatattttgtttgttgtttttatagatcgattttcgtttgacgttttttagatttttttatttgacgttttttaggtttttcgtttgacgttttagatatttttacgatcggattttttagatttttaatttgacgttttattttttttatttgattttttatatatttttcgtttgacgatttttcgattttcgtttgacgttttagatattatttatttgattttttagatttttaatttgacgttttatattttttatttgattttttatatattttatatttgttattttacgtaaatttcgtttgatattttatagattttaatttgacgttttatagatttttttcgttttttgtcgttatatatattttaaatttcgtttcgaatattttttatttgtcgttttatagatttttttttttgacgttttatagatttttaacgtgacgttttatagattttaatttgacgttttatagatatttcgtttgacgttttatagattttttttcggtttgttg

SEQ ID NO: 131 - DNA, 10762 bp, Artificial Sequence
  chemically treated genomic DNA (Homo sapiens)
taagttggttttgaatttttgggtttaagttatttttttattttggttttttaagtagttaggattataaaaatgtgttatatttagttagtaaatattttttttttgttattaaattataaaatagttaaatattagttttgtatagtttaattttttattttatttgttgtttaggttggagtgtagcggtataattttagtttattgtaatttttatttttcgggtttaagtgatttttttgttttagttttttgagtagttgggattataggtgtattattacgtttagttatttttttgtatttttagtagagatggggttttattatgttggttaggttggtttcgaatttttgattttaagtgatttgttcgttttggttttttaaagtgttggagttataggtgtgagttattgtattcggtttttatattttttttaaaaattaattttgaaagtttatttaggttgggtatggtggttaaaaattagttaagtatggtggcgggtgtttgtagttttagttatttggtaggttgaggtaggagaatcgtttgaattcgggaggcggaggtgtagtgagttaagatcgcgttattgtattttagtttggtgatagagtaagatttcgttttaaataaaaaattaatatattgtataattgtatgtaaggtggaaaagataattggaattaaaatgtgtttaggtttttgtagaagataagaaatttagaggaaagtaagtaaagggggaaaaagaaatagaaaagataaaatgattgtattaatttaatattaggttataaggttaagtttttataaatttttttttttttttttttttttttgagatagagtattattttgttatttaggttggagtgtcgtggtataattttagtttattgtaatttttattttttgggtttaagtaatttttatgttttagttttttaagtggttgggattatagataaatgttattatatgtagttaatttgtgtatttttagtagagatggggtttcgttatgttggttaggttggtttcgaatttttggttttaagtgatttgtttgttttagtttttttaagtgttgggattatagatgtgagttattgtgtttagtttttatataaattttaaatattatattttttgattataatataataaagttagaaattaaataacgaaaatataattagtaaaattttgtatgtttgaaaattttaaatatttttttagaaattataaaattatatgttaatgtggataaattttaaataattttaattgaaataattaaattatagaagtttgaataatggatttatttatataattaaagaatatatttatagtggtaatattataatgaaagatgagaaagattaatataaagtttattttagtgtttatttatgggtaataaggggattgtgaggtagggtagaaagaaggtatataaaggatttttatagtattattaatgttttattttttgagttggggttagagatttgggtgatattttatttttattttttaaattatatatacgttttgtatatttttagatattagaattttaataaaattataaaaaaagaaatagggaaaaaataattaagtataattgttaagatggagttaaaaaataatacgggtgaataaggtgttatttatatttaagttttttttttatgttatgtaatgtttttttttatttgttttattaattaataaaggtataattatttttgtgatatttttaagaaaagaatacgttttaagaaaagaaacgttttttcgaagtcgggtgcggtggtttatatttgtaattttagtattttgggaggtcgaggtaggcggattatttgaggttaggagttggagattagtttggtcgatatggcgaaattttatttttattaaaaatataaaaattagttaggtatggtggtatatgtttgtaagtttagttatttgggaggttttagttttttaagattatgagaatcgtttgaatttaggaggtagaggttgtagtgagttgagattgtgttattgtattttagtttgggtaatagaaagagattgttttaaaaaaaaaaaaaaaaaaaaaaagaatatgtttttttatttaaggttatttttttattattttaaggatttattttataattttattttttttgatatgttatatttattaaaatgtttatattaaattaagtttgtagatatttgtttttattattttataaaaagtgagatggtattaatagaggtaagatattgtttttatttgtatgttatttttggtagttttcgtagtattgaaaagattattggttggtggttttgattgttttcggttatgacgatgtatcgtttgggattttttttttggatattttgttatttgatatatataaaaagattagaaatatgaaaaaaaggtaatagtgatattaatatttggttttattattattatataagtaggtttacgttgttaattttatagtagtttgagttagatttagttttgaaataattgatttttatattatgaagtttattaatttttttttttttaaaaaaaaaattttttgagtttttttttcgtatttttataattaaatatttttttttttttttttcgaaattttttttttttttattttcgttttttaatattttgtaaattttgtttttttttgaattatattatttgaattttttaggtttttttttttttttgagacggagtttcgttttgtcgtttaggttggcgtgtagtggcgtgatttcggtttattgttagttttgttttcggggttcgtgttatttttttgttttagtttttcgaatagttgggttgttttttttataagatttaaaaataaaagaaaattggttgatttatcggcgttgtttttagtggtcgttttgttgtttttttttttatatcgcgattgaagttgtttttaaattatttttttgtttttttgtttatttgtatgaattattgagttatatttttattgttatttatttaagtaaagtatttttagtttgttaagaataaagaattataaattgtgtttattttttgtttttttttgtttttagattaaattatttgaaatatattaaaatatatgttgtatgtttatttatattaaaattatgttgtttaggtgtcgggtatagtggtttatatttgtaatttagtattttgggagtttaaggcgggcggatcgtttgaggttaggagtttaagattagtttggttaatatggtaaaatttcgtttttattaaaaatataaaaattagttaggtgtagtggatagtgtttgtaattttagttatttatgaggttgaggtttgagaattgtttgaatttaggaggttaaggtggtagtgagttgagattatgttattgtattttagtttgggtgatagagtgaaatttcgtttgaaaaaaataaaataaataaataaataaaaaattagattatattgtttagggatatttagttgataaaataatagagataagtatgatataattattataaaaattaggttttggggtgttggtggggaaggtttaagtggaaagaatggagcggtgataatgtgtgttaatttgggaggtggtgattttggggttcgttttgtaattttttaaaatgagtatttatgtgttatttattttttagaggatagaattttgaattaaaatgtttaagtagttatacgtaaaaaaagaaaaaatatggatagatttttattttaattaaaatatttaaaaaatagagataaggtagttgggcgtggtggtttacgtttgtaattttagtaatttgggaggtcgaggtaggcgaattacgaggttaagagatcgagattattttggttaatacggtgaaattaagtttttattaaaaatataaaataaagttagttaggcgtggtggcgggcgtttgtagttttagttattggggaggttgaggtaggagaatggcgtgaattcgggaggtggagtttgtagtgagtcgagattaggttattgtattttagtttgggcgatagagtaagattttaatttaaaaaaaaaaaaaaaatatagagataagggttttgttatgttgtttagggtggttttaaatttttcgggtttaagtaattttttcgtttcggttttttaaagcgttgagattttaggcgtgaattatcgcgttcgattaggaaaaaaatatatatatatataatatataatatattttataatatattatgttatatattatatataatatataatatgtataatacgtataataaaggtatatttaatatatataaagatatatatgtatataataatttttttttttgagacggagttttatttttgttgtttaggttcgagtgtaatggttcgattttagtttattgtaagtttcgtttttagggtttaaattatttttttgttttagtttttcgagtagttgcgattataggcgttcgatatacgttcggttaatttttgtatttttagtagatacggggttttattatgttggttagattggtttcgaatttttgattttaggtgattcgttcgtttcggttttttaaagtgtcgggattataggcgtgagttacggcgttcggtttgaataaattttttaaaatataaaaatttgggtgagtttttggtcggtcggtatagatgtcggggtggggtcgcgaatcggttgggacgtattttattcggtttaggggtattcgggttagtattcggtcgtcgcgcgtgcgtagtgggcggggtgtttcgcgtttttatttgtaagtggttagtgttaagtgttgggtcgtcgtttttgtcgtgtatgttggggagttagtatatgtaggtgggttttatacggagaggggcgtagattcggtgatagggttttatttggtatatcggtatggcgtaattaaagtaagagagggtggcgcgtgttagatattaacggtcggaaatcgttagatattaacggtcggaaatcgttaagatattaacgttcggaaatcgttagatattaacgttcggaaatcgttagatattaaggttcggaatatacgttagattacgacggagggcgattattttttttttgattttgttgcgggcgttcggaaaaaaaacgtagttcggtgtgttttgattggtttaggttttttgacgttacggattcgatttttgatagagttattaggcgaaaaggagagacgggaagtatttttttcgtttcgttcggaaagggtggagtataacgtcgaaagtagttaatgggagtttaggaggcggggcgtttgtgggagtcgttgagggtatttttttagttttcgaggcggattcggtgttgtatttttggagagagttgagagttcgaggtgagttgggttcgcggtcgtttttttcgttcgttttttttgagaattacggttttcgatttttttggaaatggggggaatatggtcgaggcgcgtgggaggtcgtttcgtggaggtttcggagcggtatttttagcgttttagcgattcggtgtttattaggtgcgttttgaagtcgaggtaagttttttcggggtgttgggttgcgggtaaagaattcggttttgtgaagagttgggttcggtttgttttaggttttgtttatattttattatagggtcgtggatttgaagtcggaacgtgaaatttttatagattgaatgtattttttttttatttgttttttttttttttttatttttatttttatattattttatttttaatttttattttatttttttgtagagacggggatttcgttatgttgtttaagttggtttggaatttcggagtttaagtagttcgttcgttttggttttttaaagttttggaattataggcgtaatgtattgtgtttggttttttaaaaaaaaattgaggttattttggggatagtagagcgtttagatatattttaatttgcgtagttgtttagttttaaaaaatgtaatgtatttttattttttagggtatgtgatttttggttggtaagttatatcgaattttggttagtatagttgaattttatgttagatttgtaaacgtaaatttgttttttgtatttaaatatattagatatatttaggtaattatatttaaatgtattgagatatttaaatatatttgtcgtttgtatttaaatatttgaagtggattaggtgcggtggtttatatttataattttattattttgggaggttaaggtaagtggattatgaggttaggagtttacgattagtttggttaatatggtgaaattttatttttattaaaaatataaaaattagttgggcgtggtggtaggcgtttgtaattttagttatttgggaggttgaggtaggagaatcgttggaatttaggagatagaggttgtagtgagttgagattgtattattgtagtttagtttgggtgatatagtaagattttattttaaaaaaaaaaagaaaaaaaattagaagtgaatttgtagtttgtagtgtgttgttaaataaatttatttttagagatatttttttttattttttgtgaggttatttgtagttttatatggtagatagatttaggtgagatttttagtaatatagaatgaatagtaaagaggtttgtttattttataagggtttattgaaggtttacgatgtgttaaatgttgtaggaaatatttattaatttttttttttatgtaggtttttcgtttttttttaacgagtgattaattaaattgtttattgggaatttgttaagttaatgaatatacgggatatattttttggatgagtagatattgggtagaggggtaagaggagagtagtttagatagagatttgtttatatattgtagtgtttaagagagtttgtgatgtttaggaaatagttgtttattgtgttgtaatataggggacggttagttgcggtggtttatatttgtaattttagtgttttggaaggttaaggcgggtagattatttgaggttaggagttagaaattagtttggttaatatggtgaaattttatttttattaaaaatataaaaattagttgagtgtaatggtggatgtttataattttagtaatttgggaggttgagataggagaattatttgaatttgggaggtggaggttgtagtgagtcgagattatgttattgtattttagtttaggtgatagggtgagattttgttttaaataataataataataataataataataataataataataataataatgtaggggatttgatgaagggaaaggattagagagattttgaaaagaaggtagtttggggtttagtgatgattagattttaagttttatatagtaggaagtggggtattagtaattttttaagtagaaaaattatttgattagattcgtgattttaaaaatagttttggtgatagagtggaggatgggttggagtagggaataaggggaaatgaaattgttataaaatttttaaagtgggttgggtatggtggtttacgtttgtaattttagtattttgggaggttgaggcgggcggattacgaagttaagagatcgagattattttggttaaaacggtggaattttgtttttattaaaaatataaaaaattagttgggtatggtggtgggcgtttgtagttttagttatttaggaggttgaggtaggagaatggtgtgaattcgggaggtagagtttgtagtgagttaagatcgtgttattgtattttagtttgggcgatagggcgatagagtaagaattcgttttaaaaaaaaaaaaaaaaaaaaaaaattttttaaaataagtatagtaagaattttgagggtttttgttaagatagtagttggtagttttaatttggagtagggtattaaaggtaattgtgtataaggaatagttatataattggtatttaatttttgagatgattttgatttaaatattgtgtattttttagtatattgttggtttttttaattatgtgggaaattatgttgtttttatttttttttttgtttattgtttagtttagggtgtaatgttgtaattttagtttattgtaattttcgttttttaggtttaagtgatttttttgttttagttttttaagtagttgggattataggcgtttattattatgtttggttaattttttgtatttttggtagagatagggttttacgacgttggttaggttggttttaaatttttgattttaagtgatttatttgtttttgtgttttaaattgttgggattataggtatgagttatcgtatcggttatgtttttagtttttaagaaagaagatattattattgttaaagattttggtaatttgagagatataatgtatgttttttttatgtggatattagatagtaaggatgtgttgaatttgaagtgtttatttagaagtattttgggtatttgtttaaggattgtaaaataatgtttttatttttggatataataaatgtatttgttaatataataaatgaatagattagatttataaattatttgtagtgttgagttattttttatagttaaaattaggatgaaaatatatagttgaatatttgttttgttttttgtaattgatttttttagtatagaatttgttaaggttattaaatttattgatcggaagttagtttattagatttgttttgggtcggtggtattgagtttaagtattgcggtgaagaagatagtaggaaatagtttggatgttggtgttattaatattggtaagtttgggagagttttaagttataagaaatgattagtgaatgttgttgtagttaagaaatatttgttattgaaataagattattaagtgttgatgtagtaataaattattatttttaagttaaagttagtatttattatgtgtttagtatttagttaggtagtaataataataacgatagttttttttgtgtttttatggtgtgttaggtaggtgttatgttaagaattgtatagaaatattttatttaatttgtagaatagttgggcgtggtgtttgacgtttgtaattttagttttttgagaggttgaggtggggggattgtttgaagttaagagtttaagattaatttggttaatatggggagatttcgtttttattaaaaaataaagtaggtcgggtgtggtggtttacgtttgtaattttagtattttgggaggttaaggcgggtggatatttgaggttaggaattcgagattagtttgtttaaaatggtgaaattttgtttttattaaaaatataaaaattagttagatttggtggtagaagtttgtaattttagttattggggaggtttaggaatgagaattgtttaaatttgggaggtggaggttgtagtgaatcgagatggtgttattgtacgttagtttggggatagagtaagattttgttttaaaaaaataaaataaaataaaataaaataaattttggagtagtggtttatatttgtaattttagtattttgggaggttgaggggggttgatgttttgaggttaggagtttaagattagtttaattaacgtggtaaaattttgtttttattaaaaatataaaaattagttagatgtgatggtgtatggttgtaattttagttttttagaaggttgagggaggagaattgtttaaatttgggaggtggaggttgtagtgagttaagatcgattgtgttattgtattttagtttgggtgataagagtaaaagtttattttaaaaaattaaaaaaaaaaaaaaaaaaaggaaagaaaaaaaagaaaatgataaaattaaaaaaaaattattaatttgttaaataattttatgagatagaatttattatttttattttatagttgaggaaattaagggatagtaaattttttttttttgagattataaagttaataaaatagaatttaggaagtttgattttagaattagttttgttttttttttttttttttttttttgagatagagttttgtttttgttgtcgaggttgcggtgtaatggtacgattttaatttattgtaatttttattttttaggtttaagcgatttttttgttttagttttataagtagttgggattataggtatgtattattacgtttggttaattttgtatttttagtagagatagagtttttttacgttggttaggttggtttcgaattattgattttaggtgattcgttcgttttggttttttaaagtgttgggattataggtatgaattattgcgttcggttttcgttttttttattgggtatgttaaaattattttttttaaaggaaaaggttggttaaagtgtaacggtttttataattaattgattataattagttatagatttttttgttttttttttattttaattgttttatttgattagtgtaaggaaaaaaaaaagaggaaagaaagaaaatgttaaattatttaatttgggttagtaaatggttagaaagaattttataaaaatgaaatatataaaatgatattagtatgtttaattaaaggtatagttacgatatttaaatttgtacgttataaataatattaatataaaagttgatagcgtgggtttatttttaataaatatataaatattttaaattttttaga

SEQ ID NO: 132 - DNA, 10762 bp, Artificial Sequence
  chemically treated genomic DNA (Homo sapiens)
tttagaaagtttaaaatatttatatatttattaaaaatggatttacgttattagtttttatattgatattatttataacgtgtaaatttaagtgtcgtaattatatttttagttaaatatattagtgttattttgtatattttatttttataaagttttttttggttatttattagtttagattaaatagtttagtattttttttttttttttttttttttttttttatattagttaagtgaagtagttggagtggagaaggaataaaaaaatttgtaattggttgtgattaattagttgtaaagatcgttgtattttgattagtttttttttttgaaagaaataattttaatatatttagtaaggagaacgggggtcgggcgtagtggtttatgtttgtaattttagtattttgggagattaaagcgagcggattatttgaggttagtagttcgagattagtttgattaacgtagagaaattttatttttattaaaaatataaaattagttaggcgtggtggtgtatgtttgtaattttagttatttgtgaggttgaggtaggagaatcgtttgaatttgggaggtggaggttgtagtgagttgagatcgtgttattgtatcgtagtttcggtaataagagtaaaattttattttaaaaaaaaaaaaaagaaaaaaaaatagaattggttttggaattagattttttagattttattttattagttttataattttaaaaaaaggaaatttattgttttttaatttttttaattgtaaaatggaggtaataagttttattttataaagttatttggtagattaataatttttttttaattttgttattttttttttttttttttttttttttttttttttttttaattttttgagatggatttttgtttttgttatttaggttggaatgtagtggtataatcgattttggtttattgtaatttttattttttaggtttaagtaattttttttttttagttttttgaggagttgagattatagttatgtattattatatttggttaatttttgtatttttagtagagatagggttttattacgttggttaggttggttttgaatttttgattttaaagtattagttttttttagttttttaaagtgttgggattatagatgtgagttattattttaggatttattttattttattttattttatttttttgagatagagttttgttttgtttttaggttggcgtgtagtggtattatttcggtttattgtaatttttattttttaaatttaaataatttttatttttgagtttttttagtagttgggattataggtttttgttattaggtttggttaatttttgtatttttagtagagatagagttttattattttggataggttggtttcgaatttttgattttaggtatttattcgttttggttttttaaagtgttgggattataggcgtgagttattatattcggtttgttttattttttaatagagacgaggtttttttatgttggttaggttggttttgaatttttggttttaagtaatttttttattttagttttttaaagggttaggattataggcgttagatattacgtttagttattttgtaaattaaatgagatatttttgtgtaatttttagtataatatttgtttggtatattataagaatataagaaaagttgtcgttattattattattatttagttaagtattaggtatataataggtgttaattttaatttaaaaataatagtttattattatattaatatttgatagttttattttaataataaatgttttttgattataataatatttattgattattttttgtggtttaaaatttttttaaatttattaatattagtggtattagtatttagattgttttttattattttttttatcgtagtgtttagatttagtattatcggtttagagtaaatttgatggattgattttcgattaataggtttgatggttttagtaggttttgtattaaagaaattagttataagaaataaagtaagtatttagttatatatttttattttgattttaattgtgggaaatgatttaatattgtaaatagtttatgggtttaatttatttatttattatattaataaatatatttattatatttagaaatggaaatattgttttataatttttaaataagtatttaaaatatttttggatagatattttaaatttaatatatttttattatttagtatttatatggagaaaatatatattgtattttttaaattattaaaatttttggtaataatggtgtttttttttttgaaaattgaaagtatggtcggtgcggtggtttatgtttgtaattttagtaatttgggatatagaggtaggtggattatttgagattaggagtttgagattagtttggttaacgtcgtgaaattttgtttttattaaaaatataaaaaattagttaggtatggtggtgggcgtttgtaattttagttatttgggaggttgaggtagaagaattatttaaatttgggaggcggaggttgtagtgagttgagattgtagtattgtattttaggttgggtaatgagtaaaaaaaaaagtaaaagtaatataattttttatataattagaaaaattaatagtatgttgggaaatatataatgtttaagttaaaattattttagaaattggatattagttatataattattttttatatatagttgtttttgatattttattttaaattgaagttgttagttgttgttttagtaaagatttttaaagtttttgttgtatttgttttaagaggttttttttttttttttttttttttgagacggatttttgttttgtcgttttgtcgtttaggttggagtgtagtggtacgattttagtttattgtaagttttgtttttcgggtttatattatttttttgttttagttttttgagtggttgggattataggcgtttattattatgtttagttaattttttgtatttttagtagagatagggttttatcgttttagttaggatggtttcgattttttgatttcgtgattcgttcgttttagttttttaaagtgttgggattataggcgtgagttattatgtttagtttattttaagagttttataatagttttatttttttttattttttgttttaatttattttttattttattattagagttatttttgaaattacgaatttggttaaataatttttttgtttgaaaaattattagtgttttattttttattatatgaaatttaaaatttagttattattgggttttaaattattttttttttagaatttttttgattttttttttttattaagttttttatattattattattattattattattattattattattattattattatttgagatagagttttattttgttatttgggttagagtgtaatggtatgatttcggtttattgtaatttttattttttaagtttaagtgatttttttgttttagttttttaagttgttgggattataggtatttattattatatttagttaatttttgtgtttttagtagagatggggttttattatgttggttaggttggtttttaatttttgattttaggtgatttgttcgttttggttttttaaagtattaggattataggtgtgagttatcgtaattggtcgttttttatattgtagtatagtgaataattgttttttgaatattataagtttttttagatattatagtgtataagtaggtttttgtttaaattgttttttttttgtttttttgtttaatgtttgtttatttaaagaatgtatttcgtgtgtttattaatttagtaagtttttagtaaatagtttaattgattattcgttaagagaaggcgggaaatttatatgaaaagagaaattagtgggtattttttatagtatttaatatatcgtaggtttttaataaatttttgtgaaataaataaatttttttattgtttattttatgttgttaagaattttatttaagtttgtttattatgtgaaattgtagatgattttatagaaaatggaaagaagtatttttaaaaataagtttatttggtaatatattataggttataggtttatttttgattttttttttttttttttttgagatggagttttgttgtgttatttaggttagattgtagtggtgtaattttagtttattgtaatttttgttttttgggttttagcgatttttttgttttagttttttaagtagttaggattataggcgtttgttattacgtttagttaatttttgtatttttagtagaaatgggattttattatgttggttaggttggtcgtgaatttttgattttatgatttatttgttttggttttttaaagtgatgggattataggtgtgagttatcgtatttggtttattttagatatttagatatagacggtaagtgtatttaaatgttttaatatatttaaatgtagttatttaaatatatttaatatatttaaatgtagagagtaaatttgcgtttataaatttgatatggaatttaattgtgttagttaagattcggtgtagtttattagttagaaattatatattttaagaggtaaaaatgtattgtattttttaaaattgagtagttacgtaaattaggatgtgtttggacgttttattgtttttaaaataattttaatttttttttaaaaggttaggtatagtgtattacgtttgtaattttagagttttggggggttaaggcgggcggattgtttgagtttcggagttttagattagtttgggtaatatagcgaaattttcgtttttataaaaaaataaaataaaaattaaaaataaaataatataaaaataaaaataaaaggggagagagaataggtagaaaggaaatgtatttagtttatggggattttacgtttcggttttaagtttacggttttgtgatgggatgtgggtagggtttgagataggtcgaatttaattttttatagggtcgaattttttgttcgtagtttagtatttcgaaggagtttgtttcggttttaaggcgtatttaatgggtatcggatcgttggggcgttgaggatgtcgtttcggggtttttacgaggcggttttttacgcgtttcggttatgttttttttatttttagggaggtcggaagtcgtggtttttaaagagggcgagcgagaggggcgatcgcgagtttagtttatttcgagtttttagttttttttaaggatgtaatatcggattcgtttcggggattgggaaagtgtttttaacggtttttataggcgtttcgttttttgggtttttattggttgttttcgacgttgtgttttatttttttcgggcggggcggaaaaaatatttttcgtttttttttttcgtttagtggttttgttaaaggtcgagttcgtgacgttaaagagtttggattaattagagtatatcggattgcgtttttttttcgaacgttcgtagtagggttagaagggaggtggtcgtttttcgtcgtggtttggcgtgtatttcgagttttggtgtttggcggttttcgagcgttggtgtttggcggttttcgagcgttggtgttttggcggttttcgatcgttggtgtttggcggttttcgatcgttggtgtttggtacgcgttatttttttttgttttggttgcgttatgtcgatgtattaggtaaagttttattatcgggtttgcgttttttttcgtgtggagtttatttgtatgtattggttttttaatatgtacggtaggagcggcggtttagtatttggtattggttatttgtaggtaggagcgcggggtatttcgtttattgcgtacgcgcggcggtcgggtgttggttcgggtgtttttaggtcggatagagtgcgttttaatcgattcgcggttttatttcggtatttgtgtcggtcggttaggggtttatttagatttttatgttttaaaagatttatttaggtcgggcgtcgtggtttacgtttgtaatttcggtattttgggaggtcgaggcgggcggattatttgagattaggagttcgagattagtttggttaatatggtgaaatttcgtgtttattaaaaatgtaaaaattagtcgggcgtgtgtcgggcgtttgtaatcgtagttattcgggaggttgaggtaggagaatggtttgaattttggaggcggagtttgtagtgagttgagatcgagttattgtattcgagtttgggtagtaagagtgaaatttcgttttaaaaaaaaaaattattatatatatatatatttttatatatattaaatatatttttattatgcgtattatatatattgtatattatgtgtaatatatgatataatatattataaaatatattgtatattatatatatatatattttttttttggtcgagcgcggtggtttacgtttggaattttagcgttttgggagatcgaagcgggaggattgtttgagttcggagagtttgagattattttgagtaatatagtaagatttttgtttttatgttttttttttttttttgagttggagttttgttttgtcgtttaggttggaatgtagtggtttgatttcgatttattgtaagttttatttttcgggtttacgttatttttttgttttagtttttttagtagttgggattataggcgttcgttattacgtttggttaattttattttgtatttttagtagagatttggttttatcgtgttagttaggatggtttcgattttttgatttcgtgattcgtttgtttcggttttttaaattgttgggattataggcgtgagttattacgtttagttgttttgtttttattttttaaatgttttaattaaaataaaaatttatttatattttttttttttttgcgtatggttgtttaaatattttagtttagaattttattttttgaaaagtgaatagtatataaatgtttattttgaggaattataaagcgaattttagggttattattttttaggttgatatatattgttatcgttttattttttttatttaaattttttttattagtattttagggtttgatttttatggtaattatgttatgtttgtttttattattttgttagttaagtatttttaaataatatggtttggttttttgtttgtttgtttgttttgttttttttagacggagttttattttgttatttaggttggagtgtagtggtatgattttagtttattgttattttggttttttgggtttaagtaatttttaggttttagttttatgagtagttgagattataggtattgtttattgtatttggttaatttttgtatttttagtagagacggggttttgttatgttgattaggttggttttgaatttttgattttaggcgattcgttcgttttgaatttttaaagtgttggattataggtgtgagttattgtgttcggtatttaaataatatagttttgatataggtaagtatatagtatatattttgatgtattttaggtaatttagtttaagaataggaaaggatagaaaatgaatataatttgtagttttttgtttttaataaattaagaatattttgtttaaataagtagtaatgagaatgtaatttagtaatttatataaatagataagaagataagaaaatgatttgaggatagttttaatcgcggtgtgaagaagaaagtagtaaaacgattattgaaaataacgtcggtgagttagttagtttttttttgtttttgaattttgtgggggaagtagtttagttattcgggaggttgaggtaggagaatggtacgaatttcgggggtagagttggtagtgagtcgagattacgttattgtacgttagtttgggcgatagagcgagatttcgttttaaaaaaaagagaaaatttaagaggtttaggtgatatggtttaaaaaaggataagatttataaagtattaagggacggaaataggaagaagagaaatttcgaaaagaaaagaaaaggatgtttggttatagagatacgggaaggagatttaaggaattttttttttaaagggaaaaaagttaataaattttataatataaaaattaattattttaggattgagtttaatttagattgttgtggaattggtagcgtaagtttatttgtgtgataatgatgaaattaagtgttaatgttattgttattttttttttatatttttgatttttttatgtgtattaggtggtaaaatatttaaagaaagggttttaagcggtatatcgttatagtcggaaatagttagagttattagttaatgatttttttaatgttgcgaaagttgttaaaagtgatatgtaggtaaaagtagtgttttatttttgttgatattattttattttttgtaaggtggtaaggataagtgtttataaatttgatttgatgtgaatattttagtgagtgtaatatattaagaaagataagattatggggtgaatttttggagtgatagaagggtaattttgaataagagagtatgttttttttttttttttttttttttttgagatagtttttttttgttgtttaggttggagtgtagtggtatagttttagtttattgtagtttttgttttttgggtttaagcgatttttatggttttgggaggttgaggttttttaagtagttgggtttataggtatgtgttattatgtttagttaatttttgtatttttagtagagatggggtttcgttatgtcggttaggttggtttttaatttttgattttaggtgattcgtttgtttcggttttttaaagtgttgggattataggtgtgagttatcgtattcggtttcgagagagcgtttttttttttaaagcgtgttttttttttaaaggtattataggagtgattatgtttttattgattgatggagtagatgaggagaggtattgtatgatatgggaaggaagtttagatgtgggtggtattttgtttattcgtgttattttttagttttattttgataattatatttaattattttttttttgtttttttttttataattttattgaagttttaatatttgaaagtgtataaagcgtatatgtagtttaaaaaataaaaatgagatattatttagatttttagttttagtttaagaaatgaaatattaatagtgttgtagagattttttgtgtattttttttttattttattttatagtttttttattatttataggtaaatattagggtgaattttgtgttaattttttttattttttattatagtgttattattatgaatgtgttttttaattatgtaaatgaatttattatttaggtttttgtgatttaattattttagttaagattgtttgagatttatttatattaatatgtagttttatagtttttgggaaaatatttaaaatttttaaatatatagaattttgttagttatattttcgttatttgatttttaattttattgtgttgtagttagggaatgtggtgtttgaaatttatgtgggggttgggtatagtggtttatatttgtgattttagtatttggggaggttgaggtaggtagattatttgaggttaggagttcgagattagtttggttaatatggcgaaattttatttttattaaaaatatataaattagttgtatgtggtggtatttgtttgtaattttagttatttgggaggttgaggtatgagaattgtttgaatttaggaggtggaggttgtagtgagttgagattgtgttacggtattttagtttgggtgatagagtgatattttgttttaaaaaaaaaaaaaaaaaaaaaaaaatttatggagatttagttttatggtttagtattgagttggtataattattttattttttttgtttttttttttttttttgtttgtttttttttggattttttattttttataaggatttgagtatattttaattttagttgttttttttattttatatgtagttgtatagtgtgttagttttttatttgaaacggagttttgttttgttattaggttggagtgtagtgacgcgattttggtttattgtattttcgtttttcgggtttaggcgatttttttgttttagtttgttaagtagttgggattataggtattcgttattatgtttggttaatttttggttattatgtttagtttgaatgaatttttaaaattggtttttaaaagaggtatggaggtcgggtgtagtggtttatatttgtaattttagtattttgggaggttaagacgggtagattatttgaggttagaagttcgagattagtttggttaatatggtgaaattttatttttattaaaaatataaaaaggtagttgggcgtggtggtgtatttgtaattttagttatttaggaggttgaagtaggagaattatttgaattcgagaggtagaggttgtagtgagttgagattgtgtcgttgtattttagtttgggtaataggtggagtggagaattaggttgtataaggttggtgtttaattattttatggtttggtaatagaaagaaaatatttattaattgggtatggtatatttttgtagttttagttatttgagaggttaaagtgggaagatgatttgaatttaggagtttaaggttagtttg

SEQ ID NO: 133 - DNA, 14708 bp, Artificial Sequence
  chemically treated genomic DNA (Homo sapiens)
ggttgtatttttttgtttttatttttttgttttttttatttgttttagtttggttatattagtattttgggttttttgttttgtgtttgtttgtttgtttgtttgtttgtttgtttgttttgggatggagttttattttgttatttaggttggagtgtagtgatatgattttggtttattgtaatttttattttttgggtttaaatgatttttttgttttagttttttaagtagttgggattataggtatttattattatatttagttaatttttgtatttttgtagagatgaggttttgttatgttggttaggttggttttaaatttttgattttaggtgatttgtttattttagttttttaaagtgttgggattataggtgtgagttattgagtttagtttgttttgttgttttttgagatggagttttattttgtcgtttaggttggagtgtagtggtataattttgtttgattgtagtttttattttttgagtttaagagatttttttgttttagttatataagtagttgggattataggcgcgtgttattatatgcgtttaattttggtatttttagtagcgatggggttttgttatattggttaggttggtttcgaatttttggttttaagtgatttgtatatttcggttttttgagtagttgggattataggcgtgagttattatgtagggtttttttggttttttaacgtataaagttattttttagttttgggtgtttatagtattattgttagtttttggaaagttttttttagaagtttttatatgattgattttttatttttttttaggttttagtttaaatgttttttttttagagagtttttttttgattattttatgtaatgtgtttttttttagttagtttttttttattttgtgtattttttttagagtatttattattattttggttttgatgtttgttggtttatatgtttgttgtttgttttttatatagaaagtaaattagttttttatttgttttgtttattattttattttagtatagtgattaatatatattagtagttaattaataaatagttataagttaggtacggtgatttatatttgtgattttcgtattttgggaggttaaggtgggcggattttttgaggttaggaatttgatattagtttgtttaatatggcgaaatttcgtttttattaaaattataaaaattagtcgagtgtgatggcgtgcgtttgtaatattagttatttgtgaggttgaggtaggagaatcgtttgaattcgggaggtagaggttgtagtgagtcgagattatattatagtattttagtttgggtgatagagtaagattttgttttaaaaaaataagaaatagaaatatatatatgttgttataagaaatttattattttttagtaaaaaatatagatttttaattaaagaaaggggaaatttttttttaaataattttagaattcggggtagaaaacgttatatgtggaaattcgttttgaaaaatagtttcgtttgtgaataggaaatatttggattatattttttttatttttacgaaggatttaaatgtgtagtattgatgaagaggtagttagttttagtttttattatttttgtatattttatttgtttttttttatggtatagttttgggggtaggttataaattcgtaagatgttattagtattattggttaagatgtaggaatcgttaggagttttagaaataggggagagttagaaagttggttagatttatgttttttaagtgtagggttagggttgagtttgtttttggggtaggtaagtttttttgaatttttgagggaagtagaagatataaattgttagataaaatgtaagtttagtttaaaagggttacgtgtcgttttttttagttttggggtattttttttttagaaaattggattgttttatagtgaaaatttcgggggtggttagttttttgtttcgttgttatttttattatttatagttttttaagaagtttttaggttgggtgttgaattttgattaggaattattgagaaatcgaggtagttgggagaagttgtagttttaagcgttgaaaggaagatgggggataataaatttgggtcgttaagtaaagggggtagaggtttggagaagtgggttttaggattagaggatagatcgattttatattttatttttttagattttatattttattgttattattatttacgtgtttttttcgttttttgtagcgggttttttagaggtattttttatggtttttttagattttaattttggttcgttcgttttttttttagaaaggttttcgtttgttttttttgtaggaaggtttgtatttttagaaagtttttgtttttcgattcgaggatttaatttattaggggaattaaattttgtttttaggggagtggagagagaaattgggtttttttttcgtagtttttgggatatagttgagttagttataggatttggggataatcggggcggattttttttttcgggaggcggtggtattagtttagagttcgtatttttatttatcggggaagcgtggggagaaggatgggttggagttgggttttggtttgaaggatagtagttcggagttaacggttgagtttttaaagtttttatattgtagaggaagtatagcggagattagttttagttaggatggtttcgaagtttttagggattcgacgtagagttaaagaaatttatttgtgtttttttttttttttgggagtaggtagaagattttcgggaggagaggcgaatagcggacgttaatttttttgaaagtattgtgttttttagtatcgcgggtcgttacgggttttttgttgtcgcgggatttcggtttatttttcgattgggtcgtcgtatttcggattagatttcgcgggcgatttacggaattcgcggagtcgggacgtgaaaggttagaaggtttttcgtttttattaagttttagggtttttcgtggttgttgggagttgtagtttgaacgtttttattttggcgagaagcgtttacgttttttttatcgagtttcgcggtaatttttaaagtatttgtatcgttttttcgtcgtttgtagagggcgtagtaggttttgtattttttttgtattttattttttaggttttagatttgttttttttatttaaaaaatatttattatcgagtttttatttgttatttagtattgatataggtatttaggaatataataatgaataagatagtagaaaaattttatatttttataaggtttacgtttttatgtattgaaagtaatgaataaataaattttattagagtgataagggttgtgaaggagattaaataagatggtgtgatataaagtatttgggagaaaacgttagggtgtgatattacggaaagtttttttaaaaaatgatattttaattgatgagaagaaaggatttagttgagagtaaacgtaaaagtttttttttttttattttttatatttgatataatgtaggatttttttaaaatgatttttattaattttgtttttatagttttggtttgtagaattttttattttaaaatgttagtatttacggtattaggtcggcgagaattttgattttgtatttttttttttaattttattttttttgtttttttcggtaggcggattatttgtttttatttgttatggcgattgtttagttttgtgttaggagtttcgtaggggttgatgggattggggttttttttttttatgtgtttaagattggcgttaaaagttttgagttttttaaaagtttagagttatcgtttagggagtaggtagttgttgggtttcggggatattttgcgttcgggttgggagcgtgttttttacgacggtgatacgtttttttggattgggtaagtttttgattgaatttgatgagttttttttgagttacgggttttcggtttcgtgtatttttagttcgggaaaatcgttggggttgggggtggggtagtggggatttagcgagtttgggggtgagtgggatggaagtttggttagagggattattataggagttgtattgttgggagatttgggtgtagatgatggggatgttaggattattcgaatttaaagttgaacgtttaggtagaggagtggagttttggggaattttgagtcggtttaaagcgtatttttttgtatatttattcggtgttgggcgtagggaatttttgaaataaaagatgtataaagtattgaggtttgagatttttggatttcgaaatattgagaatttatagttgtatattttagagtttatggtattttagtgaaaattggggttttatttcgaaatgattatttgggggtgattcggggagtttaagttgttaaggttttataattttcggatttttgttttttttggagcgatttttttaggtagttttcggtttcgttagatggagaaaatttaattgaaggttgttagtcgtggaagtgagaagtgttaaattaggggtttgttcgttaggtcgaggaggatcgtcgtaatttgagaggttcggtagttttgttattgtttggttttatatttatatttttgttttttgtagtagtattttcggtttttttttgtcggagtagtttattatttattcgatgagaggggaggagagagagagaaaatgttttttaggtcggttttttttatttggtagagggaggttgttatttttcgtttgtatttttttttttggattatttagttatggtttttgtaaaggtaggggtatttgttttgatgtaaattttaatttttttttttttttgaatggtgtgttttatttcgcgggtcgtttgtaatttaggcggacgttattatggcgtgagatagggagggaaagaagtgtgtagaaggtaagttcggaggtatttttaagaatgagtatattttattttttcggaggaaaaaaaaaaagaatgggtacgtttgagaattaaattttgaaagagtgtaatgatgggtcgtttgataatttgtcggaaaaataatttatttgttatttagttttgggttaggttattttagttttagacgtaggttgaacgtcgtgaagcggaaggggcgggttcgtaggcgttcgtgtggtttttcgtgtagtttttcggttcgagtcggttttttttggtaggaggcggaattcgaatttatttttttcgttgttttattttttagttcgcggttgttttatttcgtagtttttttttatgtatttgtcgcgtatcggttattttgtgtcgtatttacgttattttttttttaaatcgaggtggtatttatatatagcgttagtgtatatagtaagtgtataggaagatgagttttggtttttaatcgtttcgtgatgtttattaagttatagattttttttatcgttttagaaacgttttattacgtttttttttagtcgattttcgattttatttttattttgatttttataattattttgtttgttggagaattttatatagaatggaattaggttgggcgttgtggtttacgtttgtattttgggaggtcgaggcgggcggattatttgaggataggagttttagattagcgtggttaacgtggtgaattttcgtttttattaaaaaatataaaaattagttgggcgtggtgggtgtttgtaattttagttattcgggagggtgaggtaggagaatcgtttgaattcgggaggtagaggttgtagtgagttaagatcgtgttattatattttagtttgggcgataagaacgaaatttcgttttaaaaaaaaggggggaattatatattatgtgtttatttttgtcgggtttttgttttttaatgtattgtttgatattcgtttatgttgtatatattagtattttgtttttttttatttagtatagtttatcgattgtatattcgtttttttgatggttttttgagttgttttttatttgcggttatgaaataaagttgttataaatatttttgtataattttttttgtgattatatgttttcgtgttttttggagaaatatttaggaggggaattgcgagtttggaagtaaaaagtagttgtattttgaatttttttagaagttttgagttttttagagcggttgtattattttatattttaattagtaaggtatgggagttattatggttgtgttatagtttttcggatattaggtattgttagtttttttaatgtggtatatttttgtggttgtaatttatagttttttattgattaaggatgtttagtatttttttatgtgtttattggttattcgtattttgtttgtaaagtagtttttcgagttttttatttgttattttggttttttgtttgtttttattgtttagttgtgggattgttttatatattttggatataagttttttattagatttatgtgtcgtgaatgtttttttttgatttgttgtttgtttatttgtttgttttatagagtttatagtattttaagaggagtggatttattttttttatgtttagtatttgttttgttttgtttaggatatttttttttttttttttaattttagggttatgaagatattattttatatttttttttaggatttttatggttgtaagttttatagtaaggtttttgagttattaattaatttttaaaattaattgtttatggtgtgaggtgtaggagttagtttttggtattttttttgtatggaaatttagttattttgtttttatttgttgaaataggttttttttttttattgaatgtttttaattttaattattttatagttggagtatagggttattattttagtgttattttttttttttttttgttaatttttgagatagggatttatattgttgtttaggttagagtataatggtataattaaggtttattgtagtttcgaatttttgggtttaagtagttttttagtagttttacgagtagttgggattattttattatatttagttaattattttatttttttgtattgataggattttattatgttgtttaggttggttttaaattgttggttttaagtttttattttatttcggttttttaaagtgttgggattataggtgtgagttattatgtttgattttttagtgttattttttatttattttttttgttttttgttttttttaaacgttggaggaagaaatagtatttattttatataaattttttagaaaatagaggaatagattgggcgcggtggtttatatttgtaattttagtattttggtacgttgaggtaggggattatttgaggtcgggagttcgagattagtttggttaatacggcgaaattttatttttattaaaaatataaaaagtagttaggcgtggtgatatatatttgtaatgttagttatttaggaggttgaggtataagaattttttgaatttgggaagcggaggttgtagtgagtcgagattgcgttattgtattttagtttgggtaatagagtgagattttgttttagaaaaaaaaagaaagaaagaaaaaatagaggaatattttttaatttgttttcgaagttagtataattttggtattaaaattaaataaggatattataagaaaagaaaatatagattaatatttttgttagtatagatatgtaatagttaattaattttagtaaattaaatttggtaatatagaaaaaaggataaataggttagtcgcggtggtttacgtttgtaattttagtattttgggaggttgaggtaggtagattatttgaggttaggagtttgagattagtttgattaatatggtgaaatttcgtttttaataaaaatataaaaattaggttgggtacggtggtttacgtttgtaattttagtattttgggaggtcgaggtgggtagattacgaggttaggagtttaagattagtttgattaatgtggtgaaacgttatttttattaaaaatataaaaattagtcggtgtggtggtatttgtttgtaattttagttatttaggaggttgaggtagaattgtttgaattcgggaggtagaggttgtagtgagttaagatcgtgttattgtattttagtttgggcgatagagtaagattttattttaaaaaaaaaaaaaaattagttgggtatggtggtgggtatttgaaattttagttattcgggagtttgaggtaggagaatcgtttgaatttaggaggtagaagttgtattgagttgggattatattattgtattttagtttgggtaatagagtgagattttattttaaaaaaagaaaaagaaaaaggataaatatattttaattaaataatgtttattttatgattgtagttgatttaatatttaaaaattggtttggtgtagtagtttaggtttgtaattttaatattttaggaggttgaggtaggaagattttttgagtttaggattttaagattagtttgggtaatatagttagattggtttttattggggggaaaaaaattagtttgtgtaatttattatattaataaagggaaatataaaaattttatgattattttaatagatgtagtaaaagtagttaatgatatttaatatatatgtatgattataaattaattaattttttagtaaattagggaaaggaaatttaatttagtttgataatagggcgtttatagtcggagttttattagtagtatatataatggtagaaaatttagtgttgtcgggcgcggtggtttacgtttgtaatgttagtattttgggaggtttaggcgggcggattacgaggttaggagatcgagattgttttgattagtatgttgaaatttcgtttttattaaaaatataaaaataaaaaattagtcgggtatggtggcgggcgtttatagttttagttattcgggaggttgaggcgagagaatggcgtgaattcgggaggcggagtttgtagagtttagatcgtgttattgtattttagtttgggtgatagagtgagatttcgttttaaaaaaaaaaaaaaaaaaaaaagaaaagaaaatttaacgtttttttttttaagattaggaattagaaaaggatttgatttttataacgttgatattatattggaggttttaattaggtaagaaaaagaaataatgagggtcgggtgcggtggtttaggtttgtaattttagtattttgggaagtcgagacgggtggattacgaggttaggagatcgagattattttggttaatacggtgaaattttgtttttattaaatatataaaaaattagtcgggcgtagtggcgggcgtttgtagttttagttattcgggaggttgaggtaggagaatggcgtgaatttagggggcggagtttgtagtgagttgagatcgagttattgtattttagtttgggcgatagagtaagattgtgttttaaaaaaaaaaaaagaaaaagaaataatgattagtggttcgatgttttacgtttataattttagtattttgggaggtcgaggtgggtagattatttgaggtttggagttggagattagtttgataaagatggtgaaatttcgtttttattaaaatattaaaaaaatagttaggcgttggtcgggtatagtggtttatgtttgtaattttagtattttgggaggtcgaggtgggtggattatttgaggttaggagtttaatattagtttggttaatatggtgaaattttatttttattaaaaatataaaaattagtcgggcgtagtggcgggcgtttgtaattttagttatttgggaggtttaggtaggagaatcgtttgaatttgggaggcggaggttgtagtgagtcgagattgtattattgtattttagtttgggtgataaaagtaaaaatttcgttttaaaaaaaaaagaattagttaggggtagtggtgaacgtttgtagttttagttatttaggaggtagaggtaggagaattatttgaatttaggaggtagaggttgtagtgagtcgagattgttttattgtattttagtttaggcgataagagtaaaattttatgttaaaaaaaaaaaaaaaaaaggaaagaaaaaaaataacgattagaaaggaagaaataaaatatatttatagttagtatgattttatatatatatgttttaatggggttaggcgtggtggtttatgtttgtaattttagtatttttaggaggttgaggtaggtggtttttttgggattagtttggttaatatggtgaaattttaattttaataaaaatataaaaaattagttaggcgtggtgacgggtatttttaattttagttatttaggaggttgaggtaggagaattgtttggatttgggaggtagaggttgtagtgagtcgagatcgcgttattgtattttagtttgggtaataagagtgaaatttcggtagggtgtggtggtttacgtttgtaattttagtatttcgggaggttgaggtaggtcgattatttgaggttaggagtttgagattaatttaatatggtgaaatttcgtttttattaaaaatataagaattagttgggtgtagtggtgggcgtttgtaattttagttatttgggaggttgagatagaagaattgtttgaatttaggaggtggaggttgtagtgagttgagattatgttattgtatattacgtcgggtaatagagcgagatttcgttttaaaaaaaaaaaaaaagagtgaaattttattttaaaaaaaaaaaaaagttttaatggaaaatttataaaaagttattaaaattaataaataaatatagtagggttgtaggttatagggtaatatagttatttttttatttgtaggggtttggttttgggattttttatatattaaatttatagatgtttaagttttatatataagacggtatagtatttggatttaatttatatatatttttttatatagtttaaattatttttagattatttatattatttttatataatgaaaatgttaatgtatatgtaagtatgtatgtaagtatttgtattatattgtttagggaattattggatatataggtttttaagattgatattagtagttattgttaagattttggttaggtttgtttttgtttggggttttagttgattttattgtttttttatttagttaagggtatttgtattttttttggttttttggttatttggaaggtttagtttagtttggtatatttgtattttggtttattgatgttggtatttttgggaaggttttgttttgaaaaatacggagattttagttgttattgaagatttgagagataaagatagggagatttgtttgtagatttgtgtttttttaagtgggattgagattttgggttttttattttaggatagtattttttggtttgttgattgaatagatttttgaaggaggtgtatttgtattaatggagtgggggtgggagtagtattatagattcgtattaataattatatagttttttttagaataataatatagaataagtgaaatagaataattgtagaaagagttaatttttgttgagtttttattgtgtgtttagtattttttttaattttatattttttataatatatagagtattaggtaggttaggtttggtggtttacgtttgtaattttagtattttaggaggttaaggggggtggattatttgaggtcgggagtttaagattagtttgattaatatggtgaaatttcgtttttattagaagtataaaattagttaggtgtggtggtatatgtttgtagttttagttatttagtaggttgaggtaggagaattatttgaattcgggaggaggttgtagtaagcggagatagtgttattgtattttagtttgggtaataagagttgagatttcgttttaaaataaaataaaataaaataaaataaaataaaataaaataaaaaaagaaaagagtttgttattaaaggagttgtttggtaggggatgttttgttagtgtaaataatagaaaagtgggttgggtatagtggtttatgtttgtaattttagtattttgggaggttaaggcgggcggattatttgaagttgggagtttaagattagtttgattaatatggagaaatttcgtttttattaaaaatataaaattagtcgggcgtagtggcgtatgtttgtaattttagttattcgggaggttgaggtaggagaatcgtttgaatttgggaggtagaggttgcggtgagtcgagatcgtattattgtattttagtttggacgagagtaaaattttgttttaaaaaaaaaaaaaaatagaaaagtgtaataaatatttatagtaggtatgttttttagtaaatttgatgataaatttggtataaagaaagagagtatttttgaaaaaaaaaaaaagaaaaagaaagagagtattttgtttgggtaatatagtgaaattttgtttttataaaaaaatttaaaaattggtcgggtgtagtggtttatatttgtaattttagtattttgggagtcggaggcgggaggattatttgaggttaggagttcgaaattagtttggttaatatggtaaaattttatttttattaaaaatataaaaaattaattaggcgtattggtgggcgtttgtaattttagttatttaggaagttgaggtaagaggatcgtttgaatttgggaggtggaggttatagtgagtcgagattatattattgtattttagtttgggtgatagggcgagatttcgtttttaaaaaaaaaaagaaaaagaaaaagattaaaaaattagttaggtaggtttttgtggttttagttatttgggaggttgaggtaggagaattattgagtttaggagttcgaggttgtagtgagttatgattgtattattgtattttagtttgggtaataaagtaagattttgttttaaaagaaaaaagaaagaaagaaagaatatggcgggttaggtatagtggtttatatttgtaattttagcgttttgagaggtcgaggtaggtggattataaggttaggagttttatattagtttggttaatatggtgaaattttgtttttattaaaaatataaaaaattagttaggtatggtggtaggggtttgtaattttagttattcgggaggttgaggtaggagaattgtttgaaattagaaggtagaggttgtagtgagtttagattgtattattgtattttagtttgggcgaaaagagttaaattttattttaaaaaataaataaaaaaataaaataaaagaaaatatggtaaagtttttgaaagtttgtttgggagaaggtgcgatgatagttgtataatttcgtgtaagatgttggtttatataggggttgttttttgttttttttcgtttttttaattttttatataataggtttgtgtgttatttatatttattgagtttaagtaggtgtaaggtattgtgatttaatattttggttagtaagataataagatagattattgttttgtttttaggaagtgtatatgttattagaggaaatagataaaataaataaggaaaagtattagataatgtaagtgttatgagaatgtaaatgaggtgatgtgaattaaaataggatgatttaaagtttgtacgggaaggagtttatttttatgtttttggttagttaaggaattattagttgattagtagagaagggtagttagtttagttagagtttttggggaagagggagtggttgttaagagatgagattaaagaagtcgagacgggttattcgtgaggggtttgtaatgtagggttgaggagtgttcgaagagaatgggtaggtgagcggtgagatagttgtttttttagaagttttgtagtgaaaggaattaaagaaatggagtcgtgtattaggtggggaagggtgggggttaagggggtgtttttttttatatagagattgtaggttgagaatgattatatttttgttaataggaggtgggagtagggtacggtagtttatatttgtaattttggtattttaggaggttgaggcgggtcgattatttgaagtaaggagttcgagattagtttggttaatatgtaaagttttgtttttattaaaaatataaaaattagttgggtgtggtggtattcgtttgtaattttagttattcgggagattgaggtaggagaatggtttgaattcggaaggtagaggttgtagtgagttgagattatgttattgtgttttagtttaggtgatagagagagattttattttaaaaaaaaaaaaaaaatataggaagggagttgggaatagggtgtatatttaggaagttttggggatttagtggtgggaaggttggaagtttttttttgattgttttttttttaaagaagtgtatggttggtgaggggtggggtaggagtgtttgggttgtggtgaaatattggaagagagaatgtgaagtagttattttttttttgttttataggaagtcgagttgttttagatattggtatggtgttgggggagggggttttttttttgtaggtttaggtgatttagggttggaagtgttttatgttggatttttatttttttttttgtagt

SEQ ID NO: 134 - DNA, 14708 bp, Artificial Sequence
  chemically treated genomic DNA (Homo sapiens)
gttgtaagaggaaaagtggggatttagtatgagatatttttaattttgggttatttgggtttgtagagaaggaatttttttttttaatattatgttagtgtttgagatagttcggttttttgtggagtaggaaaagaatggttgttttatatttttttttttaatgttttattataatttaagtatttttgttttattttttattagttatgtatttttttgaggaaaagataattagagagggatttttaatttttttattattaaatttttaagattttttaaatgtgtattttatttttaattttttttttgtattttttttttttttttgagatggagtttttttttgttatttaggttggagtatagtggtatgattttagtttattgtaatttttatttttcgggtttaagttatttttttgttttagtttttcgagtagttgggattataggcgagtattattatatttagttaatttttgtatttttagtagagatagggttttgtatgttggttaggttggtttcgaattttttattttaggtgatcggttcgttttagttttttaaagtgttaagattataggtgtgagttatcgtgttttgtttttattttttgttaataaggatatagttatttttagtttgtaatttttgtatggggaaggatatttttttggtttttatttttttttatttgatatacggttttatttttttgattttttttattgtaaagtttttggaagaataattgttttatcgtttatttgtttatttttttcggatattttttagttttgtattataaattttttacgaatggttcgtttcggtttttttaattttattttttaataattatttttttttttttaaaagttttagttagattggttgtttttttttgttaattaattggtggttttttggttagttaggaatatgggggtaggttttttttcgtgtagattttaagttattttattttaatttatattattttatttgtatttttatagtatttatattgtttgatatttttttttgtttattttatttgttttttttaatagtatatatattttttaagggtagggtagtgatttattttgttgttttgttgattaaagtattagattataatgttttgtatttgtttgggtttaataaatgtgaataatatataagtttgttatatgagaggttaagagagcgagaaagagtaaggggtagtttttgtgtggattagtattttgtacgaagttatgtaattattatcgtatttttttttagataagtttttaaaggttttgttatgtttttttttgttttgtttttttgtttgttttttgagatggagtttggtttttttcgtttaggttggagtgtagtggtgtagtttaggtttattgtaatttttgttttttggttttaagtaatttttttgttttagtttttcgagtagttgggattataggtttttgttattatgtttggttgattttttgtatttttagtagagatagggttttattatgttggttaggttggtgtggaatttttgattttgtgatttatttgtttcggttttttaaagcgttgggattataggtgtgagttattgtgtttggttcgttatgttttttttttttttttttttttttttgaggtagggttttgttttgttgtttaagttagggtatagtggtgtaattatggtttattatagtttcggatttttgggtttagtgatttttttgttttagttttttaagtagttgggattatagaggtttgtttggttaattttttagtttttttttttttttttttttttttggagacggagtttcgttttgttatttaggttagagtgtagtggtgtgatttcgatttattgtaatttttattttttagatttaagcgatttttttgttttaattttttgagtagttgggattataggcgtttattaatgcgtttgattaattttttgtatttttagtagagatggggttttgttatgttggttaggttggtttcgaatttttgattttaggtgattttttcgttttcgatttttaaagtgttgggattataggtgtgagttattgtattcggttaatttttgagtttttttgtagaggtagggttttattatgttgtttaggtaggatgtttttttttttttttttttttttttttttagggatgttttttttttttatgttaaatttgttattagatttgttaagaaatatgtttattgtaagtgtttgttatatttttttgtttttttttttttttgagatagagttttgttttcgtttaggttggagtgtaatggtgcgatttcggtttatcgtaatttttgttttttaggtttaagcgatttttttgttttagtttttcgagtagttgggattataggtatgcgttattgcgttcggttaattttgtatttttagtagagacggggtttttttatattggttaggttggttttgaatttttaattttaggtgattcgttcgttttggttttttaaagtgttgggattataggtatgaattattgtgtttagtttatttttttgttgtttgtattgataaaatattttttattaaatagtttttttaatggtaggtttttttttttttttattttattttattttattttattttattttattttattttgagacggagttttagtttttattgtttaggttggagtatagtggtattattttcgtttattgtaattttttttcggatttaaatgatttttttgttttagtttgttgagtagttaggattataagtatgtgttattatatttggttaattttgtatttttagtagagacggggttttattatgttggttaggttggttttgaattttcgattttaggtgatttattttttttggttttttaaagtgttgggattataggcgtgagttattaagtttggtttatttagtattttgtgtattatgggaaatgtagagttgaggaaagtgttgggtatatagtaagagtttaataaaggttagttttttttgtaattgttttattttatttgttttatattattattttagagagaattgtgtgattgttagtgcggatttgtggtattgtttttatttttattttattaatgtaagtatattttttttagggatttatttagttaataggttaggaggtgttgttttgaaatggggggtttaaagttttaattttatttggagggatataggtttatagataggtttttttgtttttattttttaaatttttagtagtaattaaaattttcgtgttttttagagtaggatttttttaggggtattagtattagtgggttaggatataaatgtgttaggttgaattaggttttttaaatggttagggagttaagagaaatgtaggtgtttttggttgggtgggaaggtaatgagattaattgagattttaaataggggtaggtttgattagaattttaatagtggttgttggtattagttttgaaggtttatatgtttagtgattttttaaataatatagtataagtatttatatatatatttgtatgtatattagtatttttattgtatgggggtaatgtaagtaatttagagataatttaaattatatgggaggatatgtgtaggttaaatttaaatattatatcgttttatatatgggatttagatatttgtgggtttggtgtgtgaggagttttagaattaagtttttatagatagagggataattatattgttttgtaatttgtaattttgttatatttatttattagttttggtagttttttatggattttttattaggatttttttttttttttgagatagagttttattttttttttttttttttgagacggaatttcgttttgttgttcggcgtggtgtgtaatggtatgattttagtttattgtaatttttattttttgggtttaagtaatttttttgttttagttttttaagtagttgggattataggcgtttattattatatttagttaatttttgtatttttagtagagacggggttttattatgttaggttggttttaaatttttgattttaggtgatcggtttgttttagtttttcgaagtgttgggattataggcgtaagttattatattttgtcggagttttatttttgttgtttaggttggagtgtaatagcgcgatttcggtttattgtaatttttgttttttaggtttaagtaatttttttgttttagttttttgagtagttgggattagaggtgttcgttattacgtttggttgattttttgtatttttattagagttggggttttattatgttggttaggttggttttagggaagttatttgttttagttttttaaaagtgttaggattataggtatgagttattacgtttggttttattaggatatgtatgtatagaattatattggttgtgaatgtgttttatttttttttttttaatcgttattttttttttttttttttttttttttttttttgatatggaattttgtttttgtcgtttaggttggagtgtaatgggataatttcggtttattgtaatttttgttttttgggtttaagtgatttttttgtttttgttttttgagtagttgggattataggcgtttattattatttttggttaatttttttttttttgagacggagtttttgtttttgttatttaggttggagtgtaatggtgtaatttcggtttattataattttcgttttttaggtttaagcgatttttttgtttaagttttttaagtagttgggattataggcgttcgttattacgttcggttaatttttgtatttttagtagagatggggttttattatgttggttaggttggtgttgaatttttgattttaggtgatttatttatttcggttttttaaagtgttgggattataggtatgagttattgtattcggttaacgtttggttatttttttaatattttaatagagacgaggttttattatttttgttaggttggtttttaattttagattttaggtgatttgtttatttcggttttttaaagtgttgggattataggcgtgagatatcgggttattaattattatttttttttttttttttttttttgagatatagttttgttttgtcgtttaggttggagtgtagtggttcgattttagtttattgtaagtttcgttttttgagtttacgttatttttttgttttagtttttcgagtagttgggattataggcgttcgttattacgttcggttaattttttgtatatttagtagagatagggttttatcgtgttagttaggatggtttcgattttttgatttcgtgatttattcgtttcggttttttaaagtgttgggattataggtttgagttatcgtattcggtttttattattttttttttttgtttggttaaaatttttagtatggtattaacgttgtgagagttaaatttttttttagtttttgattttagaggaaaaagcgttgagttttttttttttttttttttttttttttttttgagacgaagttttattttgttatttaggttggagtgtagtggtacgatttaggttttgtaagtttcgtttttcgggtttacgttattttttcgttttagtttttcgagtagttgggattataggcgttcgttattatgttcggttaattttttgtttttgtatttttagtagagacggggttttagtatgttagttaggatagtttcgattttttgatttcgtgattcgttcgtttaggttttttaaagtgttggtattataggcgtgagttatcgcgttcggtagtattgagttttttattattatgtatgttgttagtggaatttcgattgtggacgttttgttattaaattaggttaagttttttttttttagtttgttaggaggttggttggtttgtaattatgtatatgtgttgaatattattaattgtttttgttatatttgttgaaatgattatagggtttttatgtttttttttgttaatgtggtgaattatatagattgatttttttttttttagtaaagattagtttgattatgttgtttaggttggttttgaaattttgggtttaagagatttttttgttttagttttttaaaatgttgggattataggtttgagttattgtattaggttaatttttgaatgttgaattagttataattatgagataaatattatttggttagaatgtatttattttttttttttttttttttttgagatggagttttattttgttgtttaggttggagtgtaatggtgtgattttagtttagtgtaatttttgttttttgggtttaagcgatttttttgttttagattttcgagtagttgggattttaggtgtttattattatgtttagttaatttttttttttttttgagatgaagttttgttttgtcgtttaggttggagtgtagtggtacgattttggtttattgtaatttttgtttttcgggtttaagtaattttgttttagttttttgagtagttgggattataggtaggtgttattatatcggttgatttttgtatttttagtagagatggcgttttattatattggttaggttggttttgaatttttgatttcgtgatttgtttatttcggttttttaaagtgttgggattataggcgtgagttatcgtgtttagtttgatttttgtatttttattagaaacggggttttattatgttggttaggttggttttaaatttttgattttaagtgatttgtttgttttagttttttaaagtgttgggattataggcgtgagttatcgcgattggtttatttatttttttttttatattattaggtttggtttgttaaaattggttagttgttgtatgtttatgttaataggaatattggtttatattttttttttttataatgtttttgtttggttttggtattaggattatgttggtttcgaaaataagttgggaaatatttttttattttttttttttttttttttttttttgagatagggttttattttgttgtttaggttggagtgtagtggcgtaatttcggtttattgtaattttcgttttttaggtttaagggatttttgtgttttagttttttgagtaattggtattataggtatgtgttattacgtttagttattttttgtatttttagtagagatggggtttcgtcgtgttggttaggttggtttcgaattttcgattttaaatgattttttgttttagcgtattaaagtgttgagattataggtatgagttatcgcgtttagtttgtttttttgttttttgaagagtttgtgtaagatgggtattgtttttttttttaacgtttaaagagagtagagaatagaggagataaatagaaaatagtattaagaggttaggtatggtggtttatatttgtaattttagtattttgggaggtcgagatgggatgaaagtttgaggttagtagtttgagattagtttgggtaatatagtgagattttgttaatataaaaaaataaaatagttagttgggtgtggtggagtaattttagttattcgtgaggttgttagaggattgtttgagtttaggggttcgaggttgtagtaagttttgattgtgttattgtattttagtttgggtaatagtgtgagtttttgttttaaaaattaataaagaaaaaaagaaaatagtattaaaatggtagttttatattttaattgtaaaataattaaaattaaaagtatttagtagagaaaggaagtttattttaataagtggagatagaataattggatttttatataggaaagatattagagattgatttttatattttatattataaataattaattttaagaattaattaatggtttaaggattttattgtaaaatttataattataaaggttttaaaagaaaatgtaagataatatttttatgattttggggttaaaaaaaaaaaaaaagatgttttaaataggataaggtaaatattgaatataaaaaagataaatttattttttttaagatattgtaaattttgtaaagtaaataaataggtaagtaatagattagaagaaaatatttacgatatatggatttgataaaggatttgtatttagaatgtataaagtagttttataattgaataataaaaataaataaaaaattaaaataataggtaaaagattcgaagagttattttataaataaaatacgaatggttaataggtatatgaaaaaatgttgaatatttttagttaatagagaattgtaaattataattataaggatatattatattagaaagattgataatatttaatgttcggaaggttgtggtataattataataatttttatattttgttagttggagtgtaaaatggtataatcgttttggaaaatttagagtttttgaaaaagtttaaaatatagttattttttatttttaaattcgtaattttttttttaagtatttttttaagaaatacgaaaatatatgattataaaaagaattgtataagaatgtttatagtagttttattttataatcgtaaatgggaaataatttaaaaggttattaaaaggacggatatataatcgatggattatattaaatgaaaaggagtaaaatattgatatatataatatgaacgaatgttagatagtatattgaaggatagaagttcgataaaaatgagtatataatgtatgattttttttttttttttgagacggagtttcgtttttgtcgtttaggttggagtgtagtggtacgattttggtttattgtaatttttgtttttcgggtttaagcgatttttttgttttattttttcgaatagttgggattataggtatttattacgtttagttaatttttgtattttttagtagagacggggatttattacgttggttacgttggtttggaatttttatttttaagtaattcgttcgtttcggttttttaaagtgtaggcgtgagttatagcgtttagtttgattttattttatatgaagttttttaataggtaaaatggttatggagattaaaataaaggtggggtcgggaatcgattgggaagagacgtgatgaaacgtttttgggacgatgaaaagggtttgtgatttggtaggtattacggagcggttaggggttaaaatttatttttttgtgtatttgttgtgtgtattggcgttgtgtgtaaatgttatttcgatttaggaaaaagatgacgtaagtacggtataaagtggtcggtacgcggtaggtgtatgggaagaaattgcggaatgaaataatcgcgagttaagagatggggtagcgggagaaatgaattcgagtttcgttttttattaggaagaatcggttcgggtcggagggttgtacggaggattatacggacgtttgcgggttcgtttttttcgttttacgacgtttagtttgcgtttggaattggaatggtttagtttaaagttagataataggtagattgttttttcgataaattattaaacgatttattattgtatttttttaaaatttgatttttagacgtatttattttttttttttttttttcgggaagatgagatatatttatttttgaaaatattttcgggtttgttttttgtatatttttttttttttttgttttacgttatggtagcgttcgtttaggttgtaggcgattcgcggggtggggtatattatttaaagaaggggagggattgaggtttgtattaaaataaatatttttgtttttgtaaaggttataattaagtaatttagaaaaagaaatgtaggcggagaatagtagtttttttttgttaagtaagaggaatcggtttaaaggatatttttttttttttttttttttttttatcgggtgaatagtgagttgtttcggtaaaaagaaatcggaaatgttgttgtaagaggtagaaatgtaaatgtggagttaaataataatagggttgtcgggttttttagattgcgacggtttttttcggtttggcgggtaaatttttggtttagtattttttatttttacgattgatagtttttaattggattttttttatttagcggagtcgggggttgtttggaaagatcgttttaggaaggataaaggttcggaagttgtgggattttagtagtttgggtttttcggattatttttaaatgattatttcggaatggagttttagtttttattaggatgttatgggttttaaaatatatagttatgagtttttaatgtttcgagatttaaaagttttagattttaatgttttgtgtattttttattttagggattttttacgtttagtatcgggtggatgtgtaaagaagtacgttttaggtcggtttaaggttttttaaagttttatttttttgtttaggcgtttaattttgagttcggatggttttaatatttttattatttatatttaggttttttaataatgtaatttttatgatgatttttttagttaagtttttattttatttatttttaaattcgttaagtttttattgttttatttttagttttagcgattttttcgagttgaaaatatacggagtcgagagttcgtgatttagagaggatttattaagtttagttaggagtttatttaatttagggaagcgtgttatcgtcgtggaaagtacgtttttagttcgaacgtaaagtgttttcggagtttagtagttatttgttttttggacggtggttttagatttttgagaagtttaaaatttttagcgttagttttgagtatatgggaggggaaaattttaattttattaatttttgcgaggtttttggtataaagttggatagtcgttatgataagtaagggtaagtaattcgtttgtcggaggaagtaaaggaaatggagttggggaggagggtgtagagttaggattttcgtcgatttggtgtcgtagatattaatattttggggtggaaaattttgtaagttagagttgtgagggtagaattggtggaaattattttggaggaattttgtattgtgttaaatatgaagggtggaaggaagaaagtttttgcgtttgtttttagttggattttttttttttattagttaaaatgttattttttaggaaggtttttcgtaatattatattttaacgtttttttttagatattttatattatattattttatttaattttttttataatttttattattttgataagatttatttgtttattgtttttagtatatggaaacgtaagttttatgaggatatagaatttttttattattttatttattgttgtatttttgagtgtttatattagtgttgggtagtaagtaagagttcgataataaatattttttgaatgagggagataggtttgaagtttggagaatgagatgtagaagaggtgtaagatttgttgcgttttttgtaggcggcgggggggcggtgtaggtgttttaagaattatcgcgggattcggtagggggagcgtaggcgtttttcgttaagatagaagcgtttagattataatttttagtagttacgaggagttttagggtttgatgggaacgggaaattttttaattttttacgtttcggtttcgcgggtttcgtgggtcgttcgcgaaatttgattcgggatgcggcggtttaatcggaaggtggatcgaaatttcgcgatagtaagaggttcgtagcgattcgcggtgttaaggaatatagtgtttttaaaagaattggcgttcgttgttcgttttttttttcgggagttttttgtttatttttagaagaggagggaagtataggtgggtttttttagttttgcgtcggatttttgagaatttcgaagttattttggttgaggttaattttcgttgtgttttttttgtagtatgaagattttggagatttaatcgttagtttcggattgttgttttttagattaggatttagttttagtttatttttttttttacgttttttcgatgaataaaaatgcggattttgaattgatgttatcgtttttcgaaaggggggattcgtttcggttgtttttagattttgtggttggtttagttgtgttttaggagttacgggagggggatttagtttttttttttatttttttggaaatagagtttggtttttttagtgagttgagttttcgaatcgaggagtaagaattttttgaaaatataagtttttttgtagaagaagtaaacgggagtttttttgaagaagaagcgaacgggttagagttggggtttggaaaagttatggaagatatttttggggaattcgttgtagaggacgagggagatacgtaagtggtgatggtagtggagtgtggagtttggggagatgaagtgtgaggtcgatttgttttttggttttgagatttatttttttaggtttttgttttttttgtttggcgatttaggtttattgttttttattttttttttagcgtttggaattatagttttttttagttgtttcgattttttagtggtttttggttagagtttagtatttaatttgagaattttttgaaaggttgtaagtggtaaggataataacggggtagggagttgattattttcgagatttttattgtaaaatagtttagttttttaggagagggatgttttagagttgggagaagcggtacgtagtttttttagattgagtttatattttatttagtagtttgtgttttttattttttttaaggatttaggggggtttatttattttagaggtaggtttagttttagttttatatttgaaaagtataggtttggttagttttttaatttttttttgtttttagggtttttgacggtttttgtattttgattaatagtgttgataatattttgcgaatttataatttgtttttagagttgtattatgagggggagtaggtggaatatgtagaaatggtaaggattggggttaattgtttttttattaatgttgtatatttaagtttttcgtggagatggaaaaagtgtagtttaagtgttttttgtttataaacgggattgttttttaagacgagtttttatatgtagcgttttttgtttcgaattttgaagttatttagagagaggttttttttttttttaattaggaatttgtgttttttgttaaaaagtagtgaattttttgtggtagtatatatatatttttattttttatttttttgagataaggttttgttttgttatttaggttggagtgttgtggtgtgatttcggtttattgtaatttttgtttttcgggtttaagcgatttttttgttttagttttataagtagttggtattataggcgtacgttattatattcgattaatttttatagttttagtagagacggggtttcgttatgttgggtaggttgatattaaatttttgattttagaggattcgtttattttggttttttaaagtgcggggattataggtgtgagttatcgtgtttggtttatagttatttattgattgattattgatatatgttagttattgtgttgggataaagtggtggataagatagatgaagggttggtttgttttttgtgtgggagatagataataaatatgtaaattagtaagtattaggattaagatgatgataaatgttttgaaggaaatatatagaatgaagagagattaattagaggaaagtatattgtataaaatggttaggaaggagttttttgaaaaggaggtatttgagttaagatttgaaggaggataagggattagttatgtgaaggtttttggaaagagttttttaggaattggtaatgatattataaatatttagaattgggaaatagttttgtgcgttaaaagattagaaaggttttgtatggtggtttacgtttgtaattttagttatttaggaggtcgaggtgtgtagattatttgaggttaggagttcgagattagtttggttaatatggtaaaattttatcgttattaaaaatattaaaattagacgtatgtggtggtacgcgtttgtaattttagttatttgtgtggttgaggtaggagaattttttaaatttaggaggtggaggttgtagttagataaaattgtattattgtattttagtttgggcgatagagtgagattttattttaaaaaataataaaatagattgggtttagtggtttatatttgtaattttagtattttgggaggttgaggtgggtagattatttgaggttaagagtttgagattagtttggttaatatggtaaaattttatttttataaaaatataaaaattagttgggtgtgatggtgggtgtttgtaattttagttatttgagaggttgaagtagaagaattatttgaatttaggagatggaggttgtagtgagttaagattatgttattgtattttagtttgggtgatagagtgagattttattttaaaataaataaataaataaataaataaataaataaatataaaataaaaaatttagaatgttggtatagttagattgaggtaagtgagggggatagaggggtgaggatagagaagtgtagtt

SEQ ID NO: 135 - DNA, 5969 bp, Artificial Sequence
  chemically treated genomic DNA (Homo sapiens)
ttaaggaggaaggatttataattgatttcgttgttttttattagtgttaaaatagattagtttagtgatgtttaagtggatacgatttagaagcgagacgtaaagaggttaaatacgggtaaatcgtacgtaaaattttgatattattgtaatacgttcgtggggtgggggtggtaagagtgttttagtatcgtagtttcggcgtagatcggaatttcgtagttattttggtggtttcgtggtgggaaagacgcgttttagcgaatcggtcgcgttattttcggagtacgttgggaattacggtaggttagggcgtaaagagagtagtcgggcggttttttggtgttatttgttggtttttcgtgtgtggtaagtattgtcgttttttcgttgattatttgttgggttattgtcgagaattacggttggggtgagaattgtggtttggcgttattttttagtgagggttattttggtgttcggaaagggcgttgggttattagtatattgttacgagtgggagtaggagttttgtagtcggatatcgtggattttgtttttgtttttttcgttttggttgtgtggttttttataggttatttaatttttttggggttaagttgttttatttgtgaagtggggattatagtatttatgttatgagagcgtttgaggagatgataggatgtatgagaaatgttttgttttttaaataaatgttggttttattattgttcgtttttttttgtttttttgttttttgatgttgtttttgtttgttttgtttttttgagataggattttattttgttgtttaagttggaatgtaatggtatgattatagtttattgtagttttgaatttttgggttagagcgattttttcgttttagtttttggagtagttgggattataggtatattttattttattttaaataatttttttattatttttagtagagatagggttttgttatgttgtttaggttggttttaagtttttgggtttaagtgatttttttatttgggttttttaaattgttgggattataggcgtgagttattacgatcggtttttaatttttatttattttgtttttttttaatggaacgaaagttttatgagattagaggttttgttttgatagattttaataaatgtataatattgtatgattattattataattaagatttaagatagtttcgtttttttataaaattgttttagttttttaattaatttcgtttattatttagtattagtaattattgatttgttttttttttttatagttttgttttttttagaattttatatatagggaattgtcgtggtttgaatatttgtttttttaaaattcgcgttgaaatttaatttttagtgtggtagtattgagaggtggggttttgaagaggcgattgggatatgagagttttgttataatgtttttataaatgaattaatagattaatgggtttaggggttaatgggttaatgggttatcgtgggagtgggattggtgtttttataaaaggaagaagagagatttgagttagtatattgaggtttttcgcgatgtgatgttttatacggttttaggatttaatagagtttttattagtaagagggtttttattagatgtagttttttaatttcggattttttagtttttatgagaaatgtttttgtgggattttttttatttaagtatattgtttttaagatttatttatgcgtttttttattttttcgtttttttttgtgagataaggtttggttttattgtttaagttggagtgtagttgtatgatttcggtttattgtaatttttattttttaggttttatttttattttagttttttaagtagttgggattataggtatgtattattatattcggttaatttttgtattttttgtagagatgggtttttgttatgttgtttaggttggtttttatagtttttagttggtgagttgaagaaattcgtttgttttggttttttaaagtgttggaattgtagttatgagtcgttgtgtttagtcgtatatgtatatttgtattatttatttgtttttttttattattggtatagaagggatgttttataggagtaggttttatatagggttgtttttttgattttaggttattatgagtaaaattattataaatatttatatataagttttgtgaatatagttttttattttttttgggtaaataatgtttaggtgtgggagtgttgggttatagtggttttaagggtaaatgatttttagttttgagttttttttttttagattttagttttttgttttaggtattgggatatattagtaataagaagtagtaagtttttttttttatttaggttatatttcggggatggagatagaaatatataaggaaagaataaataatatgttgtttttaaagaaattgtgtaaaaagaaaaaataaataagatgtttttgtatagtatagtagttatagagtaatgggttagaaagtggggtaggaggagaagttttttttagggaaagattttgagttgagatttgaggttttttaggtaaggggacggtgaatgtaagggtgtgtaggttatagggggataagttgggtgtgtttagtaattgtgttgggagttggatttagtagtgggggtttttattagagaggaggtagtattgagatttgggtaggaagttggggtttattttaagtttttttgaaaattaaagaagggttttaatttaaggattgtttttttttttttttttttttttttgtttgtagatagggttttgttttgttatttaggttggagtgtagtggtataattttagtttattgtaattttcgtttttcgggtttaagtgatttttttgttttagttttttgagtagttgggattgtaaatgtatgttattacgtttggttaatttttgtatttttagtagagacggggttttattatgtttgttaggttggtttcgaatttttgtgtttaagcgatacgtttttttttggttttttaaagtgttgggattataggcgtgagttatcgagttgggttaggttttaggtattgttatgatgtaaaaatttttttttagaaaagagaatattagttttttagttggttttttgtagttaggagatgtaagagtagtagttgaatttgaggtttgttttggagaaagaattaaaagtagatatggatggtttggatgtgagggagggaaagagaattttaagtgtattagtagtggtgggaggaggttcggtatagtggtgttatttggaagataaatcgttggtgtttaatttttatgattcgaaagttttttataagtttgatatattaggtaaaatgtttgattgtattaagttttagtttatcgttataaaataggttatgaaaattgcgtgagaaaatgtatataatagtttaataaataatattggttgggtgtggtggtttatgtttgtaattttagtattttgggaggttaaggtgggtagatcgtttgaggttaggagttcgagattagattggttaatatggtgagattttttatttttattaaaaaaatataaaatatatttgggtaaatatggtgaaattttatttttattaaaaatagaaaaattagttaggcgtggtggcgcgcgtttataattttagttgaggtacgagaatcgtttgaattcgggaggcggaggttgtagtgggttgagattatattattgtattttagtttgggcgatagagtaagattttgttttaaaaataaaatatatatataaaatataatagtatttgtttgtttgtttgtttttgagatgtttcggattatagtgcggggattatagacgtgagttattaagttcggataatattattatattgtttattgtatttttataatatttttaaggggtaggaatttttttttttagtttttttttttcgattttatcgagagatagggtttcgttttgtcgtttaggtttggagtgtattggcgcgattaaagtttattatagtttagattttttggttttaagcgattttttagtttgggttttttaaagcgttaggattataggcgtgggttatcgcgtttgattagttttttttttttgtagttgagttttaagagtttgtttaaagagtagaggtgggttgaaggtataaagcgaatgaaagaataggttttcgggtatcgttgtacgttttatttttttttaggggcgttgtattttagtttttttcgtatatgcgtattgggttttttatcgtttttcgtttttagtaaagtttttcgttcggagtatgcgcgggtcgtttggcgttaattgttgatcgttatagttatagttagggttagtttcgtcggttttcgggtggcgcgcgttcgttgtttttttagttttaggatgatcggttagaagacgttttattttttttttttttttagtttcgttaggaagcgatacgtttttagtttcgagtcggtcgtttaggggatcggcgtggttggggtgtttgaggaaagcggagatgcggcggtgaggcgcggtttgggtcggggttagggggtgaagggggaggaaggcggtgggtttcgtttgacggagggcgtgtaggatcgcgtttttgattcggtaaattcgggtttcgttttttaaatagtttttacgtgtttaaaatagtcgtcgttgttttttatgggtcgttatgttaaagggttagttaatgggaacgcgtttcggggtttatggcgttaattcgcgcgtcgtaggtttttttggttcggtgcgttgtttaattagaggggagagggggcgggatttagagggaggttttttgtcgcgaaaagattacgtggggacgcggtggggcgggtttggcgggggcggggtatttttgtgtagggtttttagttatcgcgacgtttttcgggaagttatagggcgttttttagttcgttttttcgttttagtttagaatttaatttttaattttcggatcgggtttagttttgggtttttattgttcgtttttgttgggatttgttttataaatgggcgttttttgttttgggtcgtgggggttgggtcggaagttgcggacgtttgggaaggggtcgttgtagtttttgagtcgtttttgcggggattatttgtaggttattttagttaagaaggtttcggttgggtaggaggagtttgggacgtcgtttttttcgtcgttgagtgtcgagtagttggatcggatttagaggaataaggtcgcggttttgtttagattcgcggttcgtaacgtgttcgtgggttttggagagagttggaagaagtattttagcggggagttcgggaaatcgtattttattaaggtaaatatggaaatgtattttttataagggtaaatgtggaggttgtcggtttttttgttttgttagtgtagtcggttaagtttatgttttcgtaggtttaggttgtattttttttaattttttttatttataaagggggtaaaagaaagttatgatgttttattttgtagttttatattggttaaagttgttaacgattcgcgagatgatattatggatttatttaagttatatagtttattgtttaggaaaggttggcgtagtaaaattattaattattttgaatgaaatttggtttgagttttaaaaagtcgagaggagtggtattgttaggatttagtttagagaaagaggtaaggaattgatttgattgaattatttaggtgggggggtaggtattgtttttgtttgttgttttttaaaagaatttggatataatatgataaagaattaatgatgttttaaataatttgtattagaagtttttttattgaatttttatggtttttaatgagaatttgattttaagtttagtttatttttaaattagt

SEQ ID NO: 136 - DNA, 5969 bp, Artificial Sequence
  chemically treated genomic DNA (Homo sapiens)
gttgatttaaagataaattagatttaaaattagatttttattggaaattataagaatttaataagaaagtttttagtgtaagttatttggaatattattagttttttgttatgttatgtttaaatttttttaaaaaataataaataaaaatagtgtttgtttttttatttaagtggtttaattaggttaattttttgtttttttttttgggttgggttttgatagtgttatttttttcggttttttaaagtttaagttaggttttatttaggatggttggtgattttattacgttagttttttttggataatagattatgtgatttaaatgaatttatgatattatttcgcgggtcgttaataattttaattaatataaagttgtagagtgaaatattatggtttttttttattttttttgtgagtaaaggaggttgaagggggtataatttaagtttacggaaatatgaatttggtcggttatattaataagataaaagggtcggtagtttttatatttatttttatggaaggtgtatttttatatttattttgataaaatacggtttttcgaatttttcgttgaggtgttttttttagttttttttaaagtttacgggtacgttgcgggtcgcgagtttgagtagggtcgcggttttgtttttttggattcggtttaattgttcggtatttagcggcgaggagggcggcgttttaggttttttttgtttagtcggggtttttttggttgggatggtttgtaagtggttttcgtagaggcggtttaagagttgtagcggtttttttttaggcgttcgtagttttcggtttaatttttacggtttaaggtagaagacgtttatttgtggaataggttttagtaaaagcggatagtaagagtttagggttgggttcggttcgggaattgggaattaggttttaaattggagcggggagacgggttgggaggcgttttatggtttttcgaggagcgtcgcggtgattgggaattttgtatagaggtgtttcgttttcgttagattcgttttatcgcgtttttacgtggttttttcgcggtaaaaaatttttttttgggtttcgtttttttttttttttgattggatagcgtatcgagttaggagggtttgcggcgcgcggattggcgttatgggtttcgagacgcgtttttattggttggttttttagtatggcggtttatgggggatagcggcggttattttgaatacgtggaggttatttggaaagcggagttcgggtttatcgagttagaggcgcgattttgtacgtttttcgttaggcggggtttatcgtttttttttttttttattttttagtttcggtttaagtcgcgttttatcgtcgtattttcgttttttttaggtattttagttacgtcggttttttggacggtcggttcggggttgggggcgtgtcgttttttggcggggttgggggagaaaaaggagtagagcgttttttggtcgattattttggagttgaggaggtagcgaacgcgcgttattcgggaatcggcgaggttagttttggttgtggttgtggcggttagtaattggcgttaagcggttcgcgtatgtttcgagcggggggttttgttgggggcggggggcggtggaaggtttagtgcgtatgtgcgggaggggttggagtgtaacgtttttgggaggaggtggggcgtgtaacggtgttcgggggtttatttttttattcgttttgtgtttttagtttatttttgttttttggataggtttttaaggtttagttgtaagaagagaagattggttaggcgcggtggtttacgtttgtaattttagcgttttgggaggtttaggttggaggatcgtttgaggttagagggtttgagttgtagtgagttttgatcgcgttaatgtattttaggtttgggcgatagagcgagattttgtttttcggtggggtcggggggagggggttgggaagaaaagtttttgttttttaggggtgttgtgggagtgtaatgaataatataataatattgttcgggtttgatggtttacgtttgtaattttcgtattgtaattcgaggtattttaaaaataaataaataaataaatattattatattttgtgtgtgtattttgtttttgagatagagttttgttttgtcgtttaggttggaatgtagtggtgtgattttagtttattgtaattttcgtttttcggatttaagcgattttcgtgttttagttaggattataggcgcgcgttattacgtttggttaatttttttatttttagtagaaatggggttttattatgtttgtttaagtgtgttttgtatttttttagtagagatgggggattttattatgttggttagtttggtttcgaatttttgattttaggcgatttgtttattttggttttttaaagtgttgggattataggtatgagttattatatttagttaatattatttgttgaattgttatatatatttttttacgtaatttttatggtttattttatgacgataaattaaggtttagtgtagttaaatattttgtttaatgtattaggtttgtgggagattttcgggttatagaggttaaatattaacgatttgttttttaaatgatattattgtatcgaatttttttttattattattaatatatttaggatttttttttttttttttatatttaaattatttatatttgtttttggttttttttttaaagtaaattttaaatttaattgttgtttttgtattttttagttatagaagattagttgggaagttggtgtttttttttttagagagagatttttatattatgataatatttggggtttggtttagttcggtggtttacgtttgtaattttaatattttgggaggttaaggaggggcgtatcgtttgagtataggagttcgagattagtttggtaaatatggtgaaatttcgtttttattaaaaatataaaaattagttaggcgtggtggtatgtatttgtaattttagttatttaggaggttgaggtaggagaattatttgaattcgggaggcggaggttgtagtgagttgagattgtgttattgtattttagtttgggtgatagagtaagattttgtttataaataaaaaaaagaaaaagaaaaaaaagataatttttaggttaaaatttttttttggtttttaaaaaggtttagaataaattttagttttttatttaggttttagtgttgttttttttttgatggaagtttttattattgagtttagtttttagtataattgttggatatatttagtttgtttttttgtggtttgtatatttttgtatttatcgtttttttgtttggaaagttttaggttttagtttaggatttttttttgaaaaggatttttttttttgttttattttttagtttattgttttataattgttatattatataaaagtattttatttattttttttttttatataatttttttagagatagtatattatttattttttttttgtgtgtttttgtttttattttcgaaatgtaatttgagtgaagaaaggaatttgttgttttttgttgttggtgtgttttagtgtttaggataagaagttgaagtttaagggagagaggtttaaagttgaaaattatttgtttttagagttattatgatttagtatttttatatttaggtattatttatttaagggaaatgaaaaattatatttataaagtttgtatgtgaatgtttatagtgattttatttatagtaatttaaaattagagaaataattttatgtggggtttatttttgtggggtattttttttatattagtaataaaaaggaataaataagtaatataaatgtgtatatacgattgggtatagcggtttatgattgtaattttagtattttgggaggttaaggtaggcggatttttttagtttattagttgaagattatggagattagtttgggtaatatggtaaaaatttatttttataaaaaatataaaaattagtcgggtgtagtggtgtatgtttgtagttttagttatttgggaggttgaggtgggagtggagtttgggaagtggaggttgtagtgagtcgagattatgtaattgtattttagtttaggtagtagagttagattttgttttataaaaaaaagcggggaggtgggggggcgtataaatgaattttaaaagtaatatgtttaagtgaaagaagttttataaaggtattttttatagaggttgagaggttcgaggttgaggggttgtatttggtgaaaatttttttgttggtggggattttgttgagttttgaagtcgtgtagggtattatatcgcgaggggttttagtgtgttagtttaggtttttttttttttttttataaagatattagttttatttttacggtaatttattaatttattaatttttgagtttattaatttattaatttatttatgaggatattatgatagagtttttatgttttaatcgtttttttaaggttttattttttaatattgttatattgaggattaaattttaacgcggattttggaggaatagatatttaaattacggtaattttttgtatatgaaattttggaaaaggtaaaattatagggagagaagatagattagtggttgttgatgttgggtgatgggcgaagttgattaagaggttggagtagttttatggagggacggaattgttttagattttgattgtggtggtgattatataatattgtatatttgttgaaatttgttaaaataaagtttttgattttatggagttttcgttttattgaggggagatagagtaaataaaaattaggagtcggtcgtggtggtttacgtttgtaattttaataatttgggaggtttaggtgggaggattatttgagtttaggagtttgagattagtttgggtaatatagtaaggttttatttttattaaaaataataaaaaaattatttagggtggggtgggatgtgtttgtagttttagttattttagaggttgagacgggaggatcgttttaatttaggagtttaaggttgtagtgagttatgattatgttattgtattttagtttgggtaatagagtgagattttgttttaaaaaaataaaataaataagaataatattaaaaaataagaaaataaagaaaaacgagtaataatggaattaatatttatttagaggatagagtattttttatgtattttgttatttttttaggcgtttttatgatataggtgttgtagtttttattttatagatgaggtaatttaattttagagaggttaagtgatttgtgggaggttatatagttagggcggaggagatagaaatagaatttacgatattcgattgtagaatttttgtttttattcgtgataatatattggtggtttaacgtttttttcggatattaaagtaatttttattgagaagtgacgttaagttatagtttttattttagtcgtgattttcgatagtggtttaataggtgattaacgggaaagcggtagtgtttgttatatacgggaggttagtaggtggtattagagggtcgttcggttgttttttttgcgttttagtttgtcgtagtttttagcgtgtttcggaagtgacgcgatcgattcgttggggcgcgttttttttattacgaggttattagggtgattgcgggatttcgatttgcgtcggagttgcgatgttagagtatttttgttatttttattttacggacgtgttgtagtgatattagaattttgcgtgcggtttattcgtgtttaatttttttgcgtttcgtttttgaatcgtatttatttgagtattattagattgatttattttaatattggtggggggtagcgaggttagttatgggttttttttttttaa

SEQ ID NO: 137 - DNA, 2872 bp, Artificial Sequence
  chemically treated genomic DNA (Homo sapiens)
gttattttgtttaagttgatttcgaatttttgggttcgattaatatttagataattttggtaggcgtaggaggattaaattttagtgaatgagatcgagtttttcggtttttttttttttatgttttttttttgattggttttcgacgatttttagtgacgtttttcgtatcgttttattcgagagttagtcgttttcgttttttcgtgcgtacgcgtagtatttcgattggttttgttttagcggattgacgggtaggttagttaatggtttcgtaatataggtggagcgagttttcgaggatgtttacgattcggtttttcgttgaatatttatgagggaggcgggtcgatttcgttgtatagttcggtcggcgttatgaagtgagaagggggttgggggtcgcgttcgttagcgggcgcggggggttttgaagatggggttatcggtgggcgcgtttgggtttttaagggggcgaggggagggtgaaggggtgggacgggggtagtcgtagggagtagtagtgatagcgaggagatattgagggggtttcgaggtttttgaggatttgagggttatcgggggcgtcgggttcgttatttttttttgggttcgacgatcgggtattgtggaggcgggagaggggttgaggggacgggaattgatttagtagtttttgtcgttaggtttaacgtggacgggtttttggtttatttttcgtacgattatatttatttcgagtagtttttttatatgcgggagtttaaacgtacgttggacgttaagggttatggagttttggagatgtttttaggtatcgggaagatagtatttttgttggttttgattatggtatattagagagtatattcgttggaggtgattaaatttatttattgtttaagaattgtgttagagattgagaaggtgattgaagagtttcgaaagttgtttaatttttatgagaagtaggagggcgagaagttgtcgtttttgggattggttttgagttttcgtaaaaatttgtgtatttattttgaggtgatatttttgcgttttgggaaggacgtcgatgggaaatgttatagttttatagttttttatgtgcgggcgtagtattagtatgatattagtttgttttattgtcgattttatgaggaatttgatgtttatgggcgtgaggtgttttttttcgttggtatttataatttggatgatttgaaggttttggggcggcgttagggttggtgtttatatttttttgttcgatatttaattttgtatgttaatgtggtggtttatagttattattattttttggattttaagattgtagatttggtgtttaaggaattggttcgtaaggtcgtcgtggttttcgacgaggtttataatattgataacgtttgtatcgattttatgagcgttaattttattcgtcggatttttgatcggtgttagggtaatttggagattttgtagaagacggtgtttaggattaaagagatagacgagtagcgtttgcgggacgagtatcggcgtttggtggaggggttgcgggaggttagcgtcgttcgggagacggacgtttatttggttaatttcgtgttgttcgacgaagtgttgtaggaggtagtgtttggttttattcgtacggtcgagtattttttgggttttttgaggcggttgttggagtacgtgaagtggcggttgcgtgtgtagtatgtggtgtaggagagttcgttcgtttttttgagcggtttggtttagcgcgtgtgtatttagcgtaagttttttagattttgtgttgaacgttttcggtttttgttgtatattttggagattatcgattttgttgattttttttcgtttattttttttgttaattttgttatttttgttagtatttacgttaaaggttttattattattatcgagttttttgacgatagaatttcgattattgttaattttattttgtattttagttgtatggacgtttcgttggttattaaattcgtatttgagcgtttttagtttgttattattatatttgggatattgttttcgttggatatttattttaagattttggatttttatttcgttattatggtaatttttattatgacgttggtacgggtttgtttttgttttatgattatcggtcgtggtaatgattaggtggttattagttttaaatttgagattcgggaggatattgttgtgattcggaattatgggaattttttgttggagatgttcgttgtggtttttgatggtatcgtggttttttttattagttattagtatatggagagtatcgtggttttttggtatgagtaggggatttttgagaatatttagaggaataagttgttttttattgagatttaggatggtgtcgaaattagtgtcgttttggagaagtattaggaggtttgcgagaatggtcgcggggttattttgttgttagtggttcggggtaaagtgttcgagggaatcgattttgtgtattattacgggcgggtcgttattatgtttggcgttttttacgtttatatatagagtcgtatttttaaggcgcggttggaatatttgcgggattagttttagattcgtgagaatgatttttttattttcgatgttatgcgttacgcggtttagtgtgtgggtcgggttattaggggtaagacggattacggttttatggtttttgtcgataagcggtttgttcgtggggataagcgggggaagttgtttcgttggatttaggagtattttatagatgttaattttaatttgatcgtggacgagggtgtttaggtggttaagtattttttgcggtagatggtatagtttttttatcggg

SEQ ID NO: 138 - DNA, 2872 bp, Artificial Sequence
  chemically treated genomic DNA (Homo sapiens)
ttcggtggaagggttgtgttatttgtcgtaggaagtatttggttatttggatattttcgtttacggttaggttgaggttggtatttgtgaggtgtttttggatttagcggggtagtttttttcgtttgtttttacgggtaaatcgtttgtcggtaaagattatgaggtcgtagttcgttttgtttttgatggttcgatttatatattgggtcgcgtggcgtatggtatcgaaggtaagaaagttatttttacgaatttggaattggtttcgtaggtattttagtcgcgttttgagaatgcggttttgtgtgtagacgtaggggacgttaaatatgatgacggttcgttcgtagtggtgtataaagtcgattttttcggatattttgtttcgggttattgatagtaggatggtttcgcggttattttcgtaggttttttggtatttttttagggcgatattggtttcggtattattttgggttttaataaagagtagtttgtttttttggatgtttttaaggattttttgtttatattaggaggttacggtgttttttatgtattggtagttggtgaagaaggttacgatgttattagggattatagcggatatttttagtaggaggtttttatagtttcggattatagtaatattttttcgggttttaaatttggagttgatggttatttggttattgttacggtcgatgattatagggtagaggtagattcgtgttagcgttatggtgaaggttgttatggtgacggggtggaagtttaggattttggggtagatgtttagcggggatagtgttttagatgtgatgatgatagattggaaacgtttaaatacgggtttgatggttagcgaggcgtttatgtagttgaagtgtaggatggggttggtaatggtcggggttttgtcgttaaagggttcgatgatgatggtgaagtttttggcgtaggtgttgataagggtggtaaagttagtaaggagggtgagcggggagaagttagtaaggtcggtgatttttagagtatgtagtagggatcggaggcgtttagtatagaatttgaggggtttgcgttggatgtatacgcgttgggttaggtcgtttaggaaggcgggcgggtttttttgtattatatgttgtatacgtagtcgttattttacgtattttagtagtcgttttaggaagtttaggaaatgttcggtcgtgcggatggagttaggtattgttttttgtagtatttcgtcgggtagtacggggttggttaggtgggcgttcgtttttcgggcggcgttggtttttcgtagtttttttattagacgtcggtattcgtttcgtaggcgttgttcgtttgtttttttgattttgagtatcgttttttgtagggtttttaggttgttttggtatcggttaagggttcggcgggtgaggttgacgtttatggagtcgatgtagacgttgttaatgttgtgggtttcgtcgaagattacgacggttttgcgggttagttttttggatattaggtttgtaattttggggtttaggaggtagtggtagttataaattattatattggtatgtaggattgagtatcgagtaaggaagtatgggtattagttttggcgtcgttttagggtttttaggttatttaggttgtagatgttagcggggaggggtattttacgtttatgggtattaaattttttatagaatcggtagtggggtaggttggtgttatgttggtattgcgttcgtatataggaggttgtgaggttgtggtattttttatcgacgttttttttaaagcgtaggggtgttattttagggtgaatatataagtttttgcgggagtttagagttagttttagaaacggtagtttttcgtttttttgttttttatagaagttgagtaattttcgaagttttttaattatttttttaatttttggtatagtttttgagtagtagatgagtttggttatttttagcggatatgttttttggtatgttatgattagggttaatagggatattgttttttcggtgtttgagggtatttttaggattttatgatttttggcgtttagcgtgcgtttgagttttcgtatgtaggagaattgttcggggtagatgtagtcgtacgggaagtagattaggagttcgtttacgttgagtttggcggtaggggttgttgggttagttttcgtttttttagtttttttttcgtttttatagtgttcggtcgtcgagtttagagaagggtgacgggttcggcgttttcggtaatttttaggtttttaggagtttcggggtttttttagtgttttttcgttattattgttgttttttgcggttgttttcgttttatttttttatttttttttcgtttttttggggatttaggcgcgtttatcgatgattttatttttaagatttttcgcgttcgttagcgagcgcgatttttagttttttttttattttatggcgtcggtcggattgtgtagcggggtcgattcgttttttttatgaatatttagcgagaggtcgggtcgtggatattttcgagggttcgttttatttatattacgagattattggttaatttgttcgttaattcgttagggtagagttaatcgggatattgcgcgtgcgtacggaaaagcgagggcggttgattttcgggtgaggcggtgcgggaggcgttattgaggatcgtcgagggttaattaaaaagaaaatatggaagggaaagagtcgagagattcgattttatttattagaatttggtttttttgcgtttgttaagattgtttgagtattgatcgaatttaggagttcgagattagtttgagtaagatagt

SEQ ID NO: 139 - DNA, 470 bp, Artificial Sequence
  chemically treated genomic DNA (Homo sapiens)
gtattttttgtatgagtatttttaaaatataaaaaggaatatatttttttggagaggaggttttagaaataattgatggtagtttgattttgtagttgttatttggtttttaatttattattattaggattaaatatttattttgtgttcgtagtggaaaatgttttttttgtaaattttaatgagttttagatatttttattaattttgtaataaatttggtagcggtgggatttaaatttacgttttcgaagagattggagttttaatttagcgttttagattattcggttacgttattacgttagtttagtattaggatttattttaatgatttaaaagatataagattattttgcgttttattattttttttttttagagtatttttatataaatgatttcgtagcggttttaattatcgataaaatttataaataggtttttagttttagttttttgttttgtag

SEQ ID NO: 140 - DNA, 470 bp, Artificial Sequence
  chemically treated genomic DNA (Homo sapiens)
ttgtaggataaaggattgggattaggaatttatttgtagattttatcggtagttgagatcgttacggaattatttgtgtagaaatgttttgagaaaaaaaaatagtaagacgtagaataattttgtgttttttaaattattaagatgagttttaatattggattagcgtggtagcgtggtcgagtggtttaagacgttggattaaggttttagttttttcgggggcgtgggtttgaattttatcgttgttaggtttattgtaaaattagtagggatatttaaagtttattgagatttgtaagaaaaatattttttattgcgagtataaggtaggtatttaattttgataatggtaggttgaaaattaaatagtagttgtaaaattagattgttattagttatttttaagattttttttttaagggagtatgtttttttttatgttttaaaaatgtttatataaaaagtat

SEQ ID NO: 141 - DNA, 910 bp, Artificial Sequence
  chemically treated genomic DNA (Homo sapiens)
tttaaggtttttaattgatttggatgaggtttattcgtattattgagggtaatttgttttatttaggttgagatatgagaatggtatgaattcgggaggcggacgttgtagtgagttgaaatcgcgttattgtattttagtttgggcgatagggcgagatttcgttttaaaaaaaaaaaaaaaaaaagaaaaaaattttttttgagacgaattttcggtttgtcgtttaggttgtagtgtagtggtgtaattttagtttagtgtagtttttattttttgggtttaagagatttttttattttagttttttaagtagtttagattataggcgtgtgttattatgtttggttatttttttttgtatttttcgtagagatggggttttattatgttggttaggttggtttcgaatttttgattttaagtgatttatttattttagttttttaaagtgttggaattataggcgtgagttatcgtgtttagttaaattttttttaattaaaaaaaagaatttttttttatttatggatttaggttatatttttttttttttttttttatatatatatttattgtttatatggttttattaaaatttaagttttagaaggatgaggtttttaattcgcgtattatataggtgtttaatatatagtatttttttttagttgtagagaaatgaatagtggaggattttcgtcgttgggtcgtacgagttaatagatcggcggtcgttggtttttcgtttttttagttatttatattacggcgtttagaggcgggatattttgtgtggataatagggagttttcggattgagtcggaagtttttttagagcggatgtcgcggcgggtttgtgggagcggggttattttttttttgttgttgtagttgttatgggtaaaa

SEQ ID NO: 142 - DNA, 910 bp, Artificial Sequence
  chemically treated genomic DNA (Homo sapiens)
ttttgtttatggtagttatagtagtagagagaagatgatttcgtttttataggttcgtcgcggtattcgttttggggggattttcggtttaattcggaagttttttgttgtttatataggatgtttcgtttttaggcgtcgtgatgtgggtggttggaagagcggagagttagcgatcgtcgatttgttagttcgtgcgatttagcggcgggggttttttattgtttatttttttataattgaaggaaaatattgtgtgttgagtatttgtgtagtgcgcgaattaaaggttttatttttttggaatttaaattttaatgaagttatgtgggtaataaatgtgtgtgtgagagagagagagagagaatgtgatttgagtttatgggtaaggaagaatttttttttttaattaaaaaaaatttggttgagtacggtggtttacgtttgtaattttagtattttgggaggttgaggtgggtggattatttgaggttaggagttcgaggttagtttggttaatatggtgaaattttatttttgcgaaaaatataaaaaaaagtagttaggtatggtggtatacgtttgtagtttaagttatttgggaggttgagatgggagaattttttgaatttagaaggtaaaggttgtattgagttgagattgtattattgtattatagtttgggcgataggtcgagagttcgttttaaaaaaaatttttttttttttttttttttttttttgagacggagtttcgttttgtcgtttaggttggaatgtagtggcgcgattttagtttattgtaacgttcgtttttcgggtttatgttatttttatgttttagtttaaataaagtagattatttttaataatgcgggtgggttttatttaaattagttgaaggttttaag

SEQ ID NO: 143 - DNA, 4356 bp, Artificial Sequence
  chemically treated genomic DNA (Homo sapiens)
gaatttacgtgattacgtatattatgtatatattttcgtttacgatcgattttcgttgttttattttaatagttataaagtagggaaatttttgttaaaatgttttttaataaattggttaaataaacgggtttattcgtacggtggatagttttttatagtgaagaggaatatgtcgtttataaagtttgtaggtattttaagggaattacgttgagttaaaattgttatttttatgggatacgtacgtaatatgtttaaaaagaaagatttttattttatggtaggggagtggttgggggttaaggacggtgggggtagtagttgggggttattgtacgtattttttattaaagttagttttttggttttgatggtattggtttagttatgggagattaattataggggagtggggatgggggaattcggaggttgtgttatttttgttatgttcgagtgttttgggtaggataatgttttagagatgtttacgttttgatttttttaaatttgtggatagaattcgttcggttttagggtttttgtaggtgtgattttcgtgaggattttgaggtttgggatttttcgggattatttgtaggttcgaaaagtaatttaggggttttgggaagaggcgggtaggagggttagaggggggtagttttaggacgatggaggtagttagtttgaggttgaaaagggagggagggtttcgagtttaggtttgtaagcgtttttagaagttggaaaaagcggggaagggattttttacggagtttgtagtaggaaggtacggttggtttttagtttattagggtttatcgtggattttcggttttcgtgttataggagggtattcgcgttgtttttttagtatgaagtgtgtggggatttgtagaagtaataggaaatttatgtattgtgaatttaggattattttaaaataaaggtttatagaaatatttaaggatagggttgaagtgttttcgggtaagggtagggtaggtacgagtgattttatttagttattttattttatttatttattttttgagatagagttatgtttttgttgtttaggttggagtgtagcggtatgattttggtttattgtaattttcgttttttgggtttaagtaattttcgtgttttagttttttaagtagttgggattttaggcgtgtattattatattcggttaattttgtatttttagtagagatgggtttttattatgttggttaggttgattttaaaattttgattttaggtgattcgtttattttagttttttaaagtgttgggattataggtatgagttattgtatttggtttatttaattattttaaaatttttttgggtttaagttatatttattggtaaggagtttatggagtttaattttttttttatttaggagttatttttttttgatattttttgtaatttttcgtagattggggatatatcgttttttgatatatttatagtttttgtgattatttgttattttatgggatttattgtaggggtagttgggaggttgtaggttttaggttttagtggggttgttatttgttagtagaaatttgatgtagaattagggcgcgagtgtggatattgttttgaattttaatgttttagtgtgtgttgaaatatgtagaaattaaagtttattttttttattttattgggattgagttttttttttatttttttttaggggtagaggagttttttttatttttgtggaggaaggaatgatattttgttattttttattgttggtattgaatttattgttttatttgttggtttgtttgttttgttttgagaggcggttttatttttgttgtttaggttggagggagtgtaatggcgcgattttggtttattgtagtttttgttttttaggtttaagtgatttttttgttttcgttttttatttggttgggattataggtattcgttattatgtttagttaattttttgtatttttagtagagacgggggtgggggtggggtttattatgttggttaggttggtttcgaatttttgattttagatgatttatttgtttttgttttttaaagtgttgggattataggtgtgagttattatgtttagtttagaatttattttgtttgaaatatttgggtttgaggtaggaagtttattttatttaagtgttgtggtgttttaagttaatgatagaatttttttattgttgttagaatatttttgatgttttatattgtgatgattaagatattattagttttttaaagatatattaattgtatttataatattggggtgttttttgggtattagcgatttttattgaatgtcgggaggcgttttttcgttatgtatatggtgttaattattttagtataattttttgtttttattttttttttttttttttttaaaattgtgttttttatgttggtttttttgtagagaattagtgtaagttataatttaatttttgttggaataaattttttaaatcgtttttttgttttagtggtagagataatttataaatatagttttttaaaaaggtttagggattattaaggggatttttagaagagcgattcgtaattttaagtatttataagacgaggttaatttttagcgagcgtgatagtttagggagggtgcgaggtttgtttaaatgttagttttataaataaagtaatttttttcggtagtttttgaaagtaggaaaggttatatttaaggttgcgtttgttagtattttagtgtttgtcgattttagttatagtatttttgtaaggtttcgggagatttagaagtttttcgttttttagatttaaatttgagtaattcggagtttggatttttgggaagtttttagttgttttgcggttgtgtcggggttttaggtttggaggggattagtggtcgtgtggtttttattgttgggttggaagtcgggttttttagttttgtagttcgaggtttggagttaggtgtttggatttcgaggttgttttttattttgtgcgggcgggatgtgattagatgttggttttatttgttagatagagtgtcggggtttagggttaaggtcgttgtggttggtgtgaggcgttcggtgcgcggttagtaggagcgtttggttttattttttattttttttcgacgggatcgtttcggtgggtgattaatagatttggggtggtttgtttatggtggggatttttcgtcgtttgagaatttgtaaagagaaatgacgggtttgtgttaaggagtttaagtcgcggggaagtgttgtagggaggtatttcgggaggtttcgcgtgttcgtttagggagtaatgcgttttcgggttcgtttttagtcgcgtttacgcgttttcgtttttttttttacgttcggtattcgtggtgttcggagttcgacgtttcgcgttcggatttggaggtagttttgggttttcggattaggttagcggttaaagggtcgtcgtacgtatttgtttttagggtttttatattatggtttttttttcgggttattttatagtttaggtcgattcgattttttttcgttggggttttcgttggcgtttttgtattttgggagcgcgagcggcgcgcgggcggggaagcgcggtttagattttcgggttcgttcggagtagttgcgttgtcggggttaggtcgggtttttagtggattcgcgggtatagacgtttaggatcgcgttttttacgtggcggagggattggggattcgggtattcgttttgtttttttattttttagtttcgtttttttcgcgcggatttcgtttcgtttcgatttttttcgggttttcggtttagtttttttcgggtttttttagtttttttttttttttttcgcggtttcgtttttttttcgcggcgcgagttttaggtagcgttgcgttttgttgcgtacgtgggaagttttggtttcggttattttcgcgatgtcgcgcgtttttcgttgtcgagtcgtgcgttttttgttgcgtagttattatcgcgaggtgttgtcgttggttacgttcgtgcggcgtttggggttttagggttggcggttggtgtagcgcggggattcggcggtttttcgcgcgttggtggtttagtgtttggtgtgcgtgttttgggacgtacggtcgtttttcgtcgtttttttttttcgttaggtgggttttttcggggtcggcgttcggttggggttgagggcggtcggggggaattagcgatatgcggagagtagcgtaggcgatttagggcgtttttttcgtaggtgttttgtttgaaggagttggtggttcgagtgttgt

SEQ ID NO: 144 - DNA, 4356 bp, Artificial Sequence
  chemically treated genomic DNA (Homo sapiens)
gtagtattcgggttattagtttttttaggtaggatatttgcgggggaagcgttttgagtcgtttgcgttgtttttcgtatgtcgttggtttttttcggtcgtttttaattttagtcggacgtcgatttcggggaggtttatttggcggaaggagggggcggcggggggcggtcgtgcgttttagggtacgtatattaggtattgggttattagcgcgcggaaagtcgtcgggttttcgcgttgtattagtcgttagttttggggttttaggcgtcgtacgaacgtggttagcggtagtatttcgcggtagtggttgcgtagtagggagcgtacggttcggtagcggggagcgcgcggtatcgcgggggtggtcggggttagggttttttacgtgcgtagtaggacgtagcgttgtttgaaattcgcgtcgcgaggagagggcggggtcgcggaaaggaaggggaggggttgggagggttcggagggggttgggtcggggattcgggaggggtcgggacggggcggggttcgcgcggaggaggcggagttggaaggtgaaggggtaggacgggtgttcgggtttttagttttttcgttacgtgggaagcgcggttttgggcgtttgtgttcgcgaatttattgggagttcggtttggtttcgatagcgtagttgtttcgggcggattcgggggtttgggtcgcgttttttcgttcgcgcgtcgttcgcgtttttagggtgtagggacgttagcgagggttttagcggagagaggtcgaatcggtttaggttgtggggtaattcgagggaggggttatgatgtggaggttttgggaataggtgcgtgcggcgattttttggtcgttggtttgattcggagatttagggttgtttttaggttcggacgcggggcgtcgggtttcgggtattacgaatgtcggacgtgaaggggaggacggaggcgcgtagacgcggttggggacgaattcgaggacgtattgttttttggacgggtacgcgggatttttcggagtgtttttttgtaatattttttcgcgatttgggttttttgatataggttcgttatttttttttgtaggtttttaggcggcgaggggtttttattatgagtaaattattttaaatttgttaattatttatcggggcggtttcgtcgagaaagggtgggaaatggagttaggcgtttttgttggtcgcgtatcgggcgttttatattagttataacggttttgattttgggtttcggtattttgtttggtagatgaggttaatatttggttatatttcgttcgtatagggtggagggtagtttcggggtttaggtatttggttttaagtttcggattgtagagttaggaggttcgatttttagtttagtagtagaagttatacggttattggttttttttagatttggggtttcggtataatcgtaggatagttgaggattttttaggaatttagatttcgggttgtttaagtttggatttaaggggcgagaaatttttgggtttttcgaggttttgtagggatgttgtagttgaggtcggtaaatattgaaatgttaataaacgtaattttaaatgtaattttttttatttttagaaattgtcggaggaaattgttttatttatggagttagtatttgaataggtttcgtattttttttgggttgttacgttcgttggaggttagtttcgttttgtaaatatttaggattacgggtcgtttttttagaaatttttttagtgatttttaagtttttttaaagggttgtgtttgtgaattgtttttgttattagggtaaaggggcggtttggaaaatttgttttaataaaagttaagttgtagtttatattggttttttgtagagaagttaatatagaaaatataattttaaaagagggaagagaagaaatggaagtagaagattatgttggagtaattaatattatgtgtatggcgaggaaacgtttttcggtatttaatgaagatcgttgatatttagaagatattttagtattatgggtgtagttagtgtgtttttgaaaagttgatgatgttttagttattatagtgtaaaatattaagagtgttttaataataataaaaaaattttattattggtttaaaatattataatatttgagtggggtgagttttttattttagatttagatgttttaaatagagtaaattttgagttgggtatggtggtttatatttgtaattttagtattttaggaggtagaggtaggtggattatttgaggttagaagttcgagattagtttggttaatatggtgaattttatttttattttcgtttttattaaaaatataaaaaattagttgggtatggtggcgggtgtttgtaattttagttaaatgggaggcggaagtaggagaattatttgaatttgggaggtagaggttgtagtaagttaagatcgcgttattgtattttttttagtttgagtaataagagtgaaatcgttttttaaaataaaataaataaattaataaatgaaatagtggatttagtattagtagtgaaaaataataaagtattatttttttttttataggagtgagaggaatttttttgtttttggggggggatagggaaggggtttaattttagtagagtaggagggatggattttaatttttatatgttttagtatatattgagatattgagatttaggatagtgtttatattcgcgttttgattttatattaggtttttattggtagatggtaattttattgggatttgaagtttgtagttttttagttgtttttgtagtgggttttatgggataataggtggttatagaaattgtgaatatgttaagagacggtgtatttttagtttacgaagaattatagaaaatattaaaggagggtaatttttgagtaaaggggaaattgaattttatgaattttttattagtgggtgtgatttgagtttagggaagttttaaaatggttaaataggttaggtgtagtggtttatgtttgtaattttagtattttgggaggttgaggtgggcggattatttgaggttaggattttgagattagtttgattaatatggtgaaagtttatttttattaaaaatataaaattagtcgggtgtggtggtgtacgtttgaaattttagttatttgggaggttgaggtacgagaattgtttgaatttaggagacggaggttgtagtgagttaagattatgtcgttgtattttagtttgggtaataagagtataattttgttttagaaagtaagtaaataaaataaaatagttaaataaaattattcgtgtttgttttgtttttgttcggaggtattttagttttgtttttggatgtttttgtaaatttttgttttgaaataattttagatttatagtgtatgggttttttgttgtttttgtaaatttttatatattttatgttagaagggtagcgcgagtgtttttttatggtacggaggtcggaggtttacgatgggttttggtgggttaagggttagtcgtgtttttttgttgtaggtttcgtggagggtttttttttcgttttttttagtttttggaggcgtttgtaggtttgggttcgaggttttttttttttttttagttttagattgattgtttttatcgttttgaggttgtttttttttgatttttttgttcgtttttttttagaatttttggattatttttcgggtttgtaggtagtttcgaaggattttagattttagggtttttacggagattatatttgtaaaggttttggggtcgggcgggttttgtttataggtttgggggaattaggacgtgggtatttttagagtattattttgtttaggatattcgggtatggtaaagatggtatagttttcgggtttttttatttttatttttttatggttagttttttataattgagttaatattattagaattaggaaattggttttagtaaaaggtgcgtgtagtagtttttagttgttgtttttatcgtttttaatttttaattatttttttgttatggggtgaaaatttttttttttgagtatgttgcgtacgtattttatggaggtggtagttttgatttagcgtaatttttttgagatgtttgtaggttttataaacggtatgtttttttttattgtgaggaattgtttatcgtgcggatggattcgtttgtttaattagtttgttaaaggatattttagtagggatttttttgttttgtagttattaaaataaaatagcgggggtcggtcgtggacgggagtgtgtatatgatgtgcgtagttacgtgaattt

SEQ ID NO: 145 - DNA, 20 bp, Artificial Sequence
  UNG primer
gttatagttatagttagggt

SEQ ID NO: 146 - DNA, 20 bp, Artificial Sequence
  UNG primer
ttgtttaattagaggggaga

SEQ ID NO: 147 - DNA, 17 bp, Artificial Sequence
  UNG detection oligonucleotide
aggaaggcggtgggttt

SEQ ID NO: 148 - DNA, 17 bp, Artificial Sequence
  UNG detection oligonucleotide
aggaaggtggtgggttt

1. A nucleic acid comprising a sequence at least 18 bases in length of a segment of the chemically pretreated DNA of genes associated with DNA repair according to one of the sequences taken from the group of Seq. ID No.1 to Seq. ID No.144 and sequences complementary thereto.

2. A nucleic acid comprising a sequence at least 18 base pairs in length of a segment of the chemically pretreated DNA of genes associated with DNA repair according to a sequence according to one of the genes PMS2L1 (D38435), PMS2L12 (AF053356), PMS2L2 (D38436), PMS2L3 (D38437), PMS2L4 (D38438 and D38500), PMS2L5 (D38439), PMS2L6 (D38440), MGMT (NM_{—}002412), MSH2 (NM_{—}000251), NUDTI (NM_{—}002452), TDG (NM_{—}003211), INPPL1 (NM_{—}001567), RFC4 (NM_{—}002916), DDIT1L, FANCB, XRCC8 and sequences complementary thereto:

3. An oligomer, in particular an oligonucleotide or peptide nucleic acid (PNA)-oligomer, said oligomer comprising in each case at least one base sequence having a length of at least 9 nucleotides which hybridizes to or is identical to a chemically pretreated DNA of genes associated with DNA repair according to one of the Seq ID Nos 1 to 144 according to claim 1 or to a chemically pretreated DNA of genes according to claim 2 and sequences complementary thereto.

4. The oligomer as recited in claim 3; wherein the base sequence includes at least one CpG dinucleotide.

5. The oligomer as recited in claim 3; characterized in that the cytosine of the CpG dinucleotide is located approximately in the middle third of the oligomer.

6. A set of oligomers, comprising at least two oligomers according to any of claims 3 to 5.

7. A set of oligomers as recited in claim 6, comprising oligomers for detecting the methylation state of all CpG dinucleotides within one of the sequences according to Seq. ID Nos. 1 through 144 according to claim 1 or a chemically pretreated DNA of genes according to claim 2, and sequences complementary thereto

8. A set of at least two oligonucleotides as recited in claim 3, which can be used as primer oligonucleotides for the amplification of DNA sequences of one of Seq. ID No. 1 through Seq. ID No. 144 and sequences complementary thereto and/or sequences of a chemically pretreated DNA of genes according to claim 2, and sequences complementary thereto and segments thereof.

9. A set of oligonucleotides as recited in claim 8, characterized in that at least one oligonucleotide is bound to a solid phase.

10. Use of a set of oligomer probes comprising at least ten of the oligomers according to any of claims 6 through 9 for detecting the cytosine methylation state and/or single nucleotide polymorphisms (SNPS) in a chemically pretreated genomic DNA according to claim 1 or a chemically pretreated DNA of genes according to claim 2.

11. A method for manufacturing an arrangement of different oligomers (array) fixed to a carrier material for analyzing diseases associated with the methylation state of the CpG dinucleotides of one of the Seq. ID No. 1 through Seq. ID No. 144 and sequences complementary thereto and/or chemically pretreated DNA of genes according to claim 2, wherein at least one oligomer according to any of the claims 3 through 5 is coupled to a solid phase.

12. An arrangement of different oligomers (array) obtainable according to claim 11.

13. An array of different oligonucleotide- and/or PNA-oligomer sequences as recited in claim 12, characterized in that these are arranged on a plane solid phase in the form of a rectangular or hexagonal lattice.

14. The array as recited in any of the claims 12 or 13, characterized in that the solid phase surface is composed of silicon, glass, polystyrene, aluminium, steel, iron, copper, nickel, silver, or gold.

15. A DNA- and/or PNA-array for analyzing diseases associated with the methylation state of genes, comprising at least one nucleic acid according to one of the preceeding claims.

16. A method for ascertaining genetic and/or epigenetic parameters for the diagnosis and/or therapy of existing diseases or the predisposition to specific diseases by analyzing cytosine methylations, characterized in that the following steps are carried out:
a) in a genomic DNA sample, cytosine bases which are unmethylated at the 5-position are converted, by chemical treatment, to uracil or another base which is dissimilar to cytosine in terms of hybridization behavior;
b) fragments of the chemically pretreated genomic DNA are amplified using sets of primer oligonucleotides according to claim 8 or 9 and a polymerase, the amplificates carrying a detectable label;
c) Amplificates are hybridized to a set of oligonucleotides and/or PNA probes according to the claims 6 and 7, or else to an array according to one of the claims 12 through 15;
d) the hybridized amplificates are subsequently detected.

17. The method as recited in claim 16, characterized in that the chemical treatment is carried out by means of a solution of a bisulfite, hydrogen sulfite or disulfite.

18. The method as recited in one of the claims 16 or 17, characterized in that more than ten different fragments having a length of 100-2000 base pairs are amplified.

19. The method as recited in one of the claims 16 through 18, characterized in that the amplification of several DNA segments is carried out in one reaction vessel.

20. The method as recited in one of the claims 16 through 19, characterized in that the polymerase is a heat-resistant DNA polymerase.

21. The method as recited in claim 20, characterized in that the amplification is carried out by means of the polymerase chain reaction (PCR).

22. The method as recited in one of the claims 16 through 21, characterized in that the labels of the amplificates are fluorescence labels.

23. The method as recited in one of the claims 16 through 21, characterized in that the labels of the amplificates are radionuclides.

24. The method as recited in one of the claims 16 through 21, characterized in that the labels of the amplificates are detachable molecule fragments having a typical mass which are detected in a mass spectrometer.

25. The method as recited in one of the claims 16 through 21, characterized in that the amplificates or fragments of the amplificates are detected in the mass spectrometer.

26. The method as recited in one of the claims 24 and/or 25, characterized in that the produced fragments have a single positive or negative net charge for better detectability in the mass spectrometer.

27. The method as recited in one of the claims 24 through 26, characterized in that detection is carried out and visualized by means of matrix assisted laser desorption/ionization mass spectrometry (MALDI) or using electron spray mass spectrometry (ESI).

28. The method as recited in one of the claims 16 through 27, characterized in that the genomic DNA is obtained from cells or cellular components-which contain DNA, sources of DNA comprising, for example, cell lines, biopsies, blood, sputum, stool, urine, cerebral-spinal fluid, tissue embedded in paraffin such as tissue from eyes, intestine, kidney, brain, heart, prostate, lung, breast or liver, histologic object slides, and all possible combinations thereof.

29. A kit comprising a bisulfite (=disulfite, hydrogen sulfite) reagent as well as oligonucleotides and/or PNA-oligomers according to one of the claims 3 through 5.

30. The use of a nucleic acid according to claims 1 or 2, of an oligonucleotide or PNA-oligomer according to one of the claims 3 through 5, of a kit according to claim 29, of an array according to one of the claims 12 through 15, of a set of oligonucleotides according to one of claims 6 through 9 for the diagnosis of Ataxia telangiectasia, Ageing, Bloom's Syndrome, Immunodeficiency, Cockayne syndrome, Nijmegen breakage syndrome, Trichothiodystrophy, Fanconi Anaemia, Werner Syndrome, solid tumors and cancer.

31. The use of a nucleic acid according to claims 1 or 2, of an oligonucleotide or PNA-oligomer according to one of claims 3 through 5, of a kit according to claim 29, of an array according to one of the claims 12 through 15, of a set of oligonucleotides according to one of claims 6 through 9 for the therapy of Ataxia telangiectasia, Ageing, Bloom's Syndrome, Immunodeficiency, Cockayne syndrome, Nijmegen breakage syndrome, Trichothiodystrophy, Fanconi Anaemia, Werner Syndrome, solid tumors and cancer.

32. A kit, comprising a bisulfite (=disulfite, hydrogen sulfite) reagent as well as oligonucleotides and/or PNA-oligomers according to one of claims 3 through 5.
